United States Patent Application Publication US 2022/0167576 A1 - sequence listing, part 11

SEQ ID NO: 30 - DNA, 35937250 bp, Oryza sativa (residues 21,139,561-23,253,516 of 35,937,250)
  misc_feature (5969519)..(5970518): n is a, c, g, or t
  misc_feature (13681864)..(13682863): n is a, c, g, or t
  misc_feature (13684155)..(13684254): n is a, c, g, or t
  misc_feature (18795366)..(18796365): n is a, c, g, or t
  misc_feature (24815509)..(24816508): n is a, c, g, or t
  misc_feature (35936251)..(35937250): n is a, c, g, or t
atgaagaggagtttataccatcagaggaacatgatacagggtcttatgtttggagaaacaatatatataattgtcttaaaaaggcgtattccttatttactcccatttatagttggagcaacctcgtatcctaatttggaagagtagatgtaaaatgaaaccagaaatgtttgtgactgcttctgttggatcgactaaatactagagaaatgttgcagagaaaacattttatagtatagggagaaccagaatgtgtaatataatgtgcagcgatacaacccttgaagacatggttcatctctttttctctttctcttttgcaaggagtttctggacttacatgaaaatacagtggagaatggatctcaatttcatgaatatgattatgtatgctaaagcacattttcagaaatctttcattgttgaagcggtggcggtaagatgcaaacacaagccatgggaattgaatatatatagctccaaataagtgtagggttcaattagggaaggttgtacgtcttgtgtccaaactcgagagtagattctacgcgaggatccaattaaagcatatgcttgatatgattgttccagatagatttttatattttggcttaacatgtcttcaaacctgccagtgattccaagttgcggtttaataggaattggacaggaataaatgagcggtattagagaagcaccggtgtgcatggtggtaaagttatgtcattgactttattcattagagttcgaattttagtctccactaatattactcatgcatagggtgcacttttaataggatcttagtgagaataaggatgcgctgtttgtctgtctttttaacatgtgttaatagtgagtgttttcgggtgtgtgagtatggtgtacatttgtagtggtttacatacatatatatcttccatgtgataaaaaaatagtggtatttatcacctgagggctgctacaaaatgggatcatgttgcaacgggatagacatattaactattctcttgcacgagtatcacagatatcagattctaggtatcacaggtaccgagtaacaggtatcacaggtatattaggtactgtctaatagaaggatattccgttccaacggaataccgttgtctagattttatgtcaccttgcaaaaattatagaagagttcattagctctttatgagtagtacttcgagccacaacatgggaacacactaacatttacttcctccgtacttaaaaaattatctttttagatttaaaatttgtttaaaaaaatagttgtcactctgtattactatacttgtcccattaattacctcatatttatttatttattgtcctaacccatcctctccctcctaactatgcatcatttaataacttaataacagacactttaatctttcttttcaaaccttcgtatattataaacaacctataatgatgactattttgatacgggagtagtacatagtagtacatccatccgaaaagaatttatatttttacatcaagtctagatataattcataacttatgttgaaacggagtaagtaatagtttagctgcagggtagtcataccataattagctatagccacaccttatttcacatttttctcgtgcagaaaatgtcacttgttttcgtttctttctctttttttccccccaaaattgaccagtaggttaattataaataaaactctctttatctaaaaatagctgagcttgctttctcgatctctcataaatccagtgtcggaaggacggatgatcaatggacagccagcaggccagccacgtgtacacataactaaccatatctcctgttcgtcaatgccagagagggatcgaggagaaagtgaccaaatctgaatcataataatacgggttaagatatcgctggatgagatcctgtcgattgcatctcgcaatcgatctacagcctgctgctgtccctctcaatatccaagattttgcagggatgtcacttcaggctccatgtatttcttcttcttttttttcatttgattttttttctcagctggtgtgtgcttgtgtgtgttcttttctctcttgtcggtggaatattttggcaatgagaacacactatattcaggtcagatttgattctctgaaaatctgaacaaagagaaaagaatgtagggcatgaatgtacaggcggggtgaagttgatgtgtgcattttctcaattcacttgatatattttgttgcctgctttctagcaagcaaccaatgatctaagataatgaagcttttaaaagatttttttcgatatgtttaaaagttgcactaagttggccagttgatatgaggggaactaaagttgatcagttgaaaagaaagaaaaggacaccaaagaaaaagctttagatcttaccatttgacctaaggaacacttctaaagatttctgattgacccttgtttaacaaatgtgcatctactcatctcagaaatcttatctttcggtaagcgcaaacctttgcattcattcaaccacaaaaatcacatggctggattagtttccattatcatatatatatatatatatatatatatatatatatatatatatatatatatatatatatatatatatatatatatatatatgatggataatatatagaagtgaacagtattgtttcttccatcatgcacaaatgtttttacttttttaagcaacataaatgtttttatttcttgcttctaaaaaaataagttggataatcttatctttcaatgttgctgcgggagttttgtataataatagtataaataatatgtaagatagcttgatgacataaacttatttactttatataattaattttcatctttgattgattattgaaaaaatataaacaattaagatgatgtggtttataacaatatcaatcattcaaaagcaaaattaaggtgatgtggctcggtaataaaagaaaaaggaagggagataatatagattaatcattcaaagataaaattaatgtgatatgacttcataagagacgaaaagaatagagatagtttgaaccatagatcaattatccaagggctagaaataattgggtcctacattagtagaaatataatttttatgagacaaaggttcaaaagtagaaattcaatttttataggacggatgtagtaatatttaaggttgattgcaagggcaggtattctatcaaattagaggttatgaaagcctatcttaaggaatatccataggacaggggttagcatcctaaaaaaaacagaaaaaaaagattggttcctttggcattaatgttgcttgcaaatcgcactatatctcttggctttatagaaaagaaatgccacagtggatttggaggtgggatagaggcctaccaactcataaaggataacaaaggaaaggctcttgtacagatcacataccaaagattggtggtatatatggattctccaataaaaagcttttttattctgattgaattcgcttgaaacaaagacaattcgcttgacaatagttagctagctagggaataaatcattttcatgattggattctctttttcaaaccctatatataatcttaacccttttgtgttgtctatatctctacactttgaagaaatgttcgaggagaaaaggaacagatttttcagcagttaatatattttcaaattgaagctatttccatatgaaatagcgtctcatttagagcataaaaacgtgaatattagggaataacgtgatatcaaataattagaatggacgaggctttaaatacagatcatttagcccatgaccttgtgaagctagccagaaaacctatgggcgtttctctctcatctagagcaacatatgacatcactgtccgggggaagatgccacattagtttttttttatcgacggacagttcaagagacagtttaatggcatctatatcactctacatattgtctataaattgaaagtcattaattattcgagtacatttgagatagctaatcaaacgacttgtttaattatggtttacctacatgttgtgtaaatatgataatatataaatgatatatgacgtataacgatatagatggtacatggtagctgtctaaaccaatgttcatgctcttactactacacttgttgccaatagaattaaattttaattattcgaatatattaaaaacagctaaacaaaagacttacatataaagttttttcctttaataatggatttaaaacacgggcctatacatctaaaacatgtacatagccaaaaaaaacgtataaagatataccctctctatcaagaaaaagaaattcactgagtttgaatctagattatactatgtccatattcaaaacgtaagattgaggtttcttttaatagagggagtagagagtagctgtctaaaccaaaatgtccaatgtataaagtagtatatgaataattttggccgattatttcgatcaaaatcgagctgtttttccacggggaatccctgccctgtactagaaggagcactaaatgaaacaaaagataaagcagcagtccagtccagtgattcagtcagttcagacttcagacttcagacttcaaataaaagataaatccccaggtacttgtaccattcgatacgcactccaccaatcgagttgatgaccaaatcgtccggaactaggaccgatcaatcgatcaaatctcgccttcttttttttctttctcatcagttccacagatcgctgctgctctctctgcatcatcatcatcagcagcagcagcagcggatccaattccaatccatcctgctcgtgcggctgcaacttccactgcatctcacgggacaaagcaagcaatgcctcgtcgccgtcgtcgccggagaggcagagatgatctccggtcgttccctcagtccggccctggattctctcctcctgtcaatctgattcccaaaattgatgaaagaggacatctccccggatcctctgctcgtcggtcagctattgctatcgagtgcaatactgtatattgtatgcttttattttttcagatttcgtcgtcgggggatatcgatgtggtccatgaataatatgcatcgatcgtggctcactgttggctgttacttgggggggtccctactactgtagtagtatacttgttgcatgattttctcaatccgattccgaggatgtacataaaatgcgcaggtgccattttcatgtcttcaactatactctcacttcgtttctaaatggttgtcacgttacccaaaaataaaaaacaaaaagtttcaatttaatcgttgtatttcgttatgaaggtctgtttagctcaaggagttggatctggagtagagttgttgagcaacctaaacatatagttttatctctctaatttatttttacgagagcgcttcacctaatgccgcctgcttttttagttttttaacaaattttttaaataagatggacaatcaaatattgaacataacaaccgacgaagggagtactaattagttcctatatattaggtttatcgtattatatgaaatacatgccatactcacacctatgtgtccgttcctttattacatccccaaatagacgaagattaaccataaatcactagtttcattaaattcctattgaattcttgtgcataatattaataaacaccaagattttaatcatggatccaccactttatcacactaccaaatggtggttccctaaatagatatatattctatgcttattactatcctttttatatacgtttttcttgcaaggattttatagtacacggtttttgagctactgttgaactgatatatatatatatatatatatatatatatatatatatatatatatatatatatatatatatatatatatatatatatatatattctcatggagcatctcaacaaaattttgtagctcctaggaaattgtcatcggcacataattataaggtataagtcatggtcacgatttctagagcactccttttttttttctactagatcatgtcattttctctacggatttcggcatcgtggaacaaatgaatccacttggttgttgattagcaccatgatgtatgagtctccatgataaccagatcaatgccaattatacctatagtgatatcaacggaacaaaaaaccgtataacctatcctatccgaatatcatcacaaaatcgtggtaacgaatcaaacacataagtacaatatttaacacaaacaattccttaacaaacccaagcaattccttgaaaaaaaaaatggttggctccccatgctttatgttctatccttacatgttatccaattcgcgatagcatgaacccatgagaaaaaaaatttcaatctatgttacaacgccccggtatttaaaataggaaatcacgtcattaattctctccgtgagtgtggtgagaactggtgattaaaggggagaccttggaatattatatttttttaataatagaaatggtttaacagaatattataatgataatataaaactatttttaaggggaaaaatagatttaaaacatggtgccaaaactttttctctttgctgccacctgctctgcagcctgctgctcggtgaaatggcgaatccatcgtccatgacatcgcatgcgccacaccgatttatatccatcgtccattcatccgtcctgtccatcgccttcagtgttcttcagtcggacccaaatcgatcggcgagagattatcatgtctgtccgtgtgggtgatcagaacgctgagcgtgccagaaaatctacgagagcaacggtgaagagatcagacgcagatgacattaaattcctttcgtgttttttggcagtttgttccagaggcttaatttgacgtttcaacttcctgtccaaaaataattgccggtttaactttgagtaatcccccctttgaaacgcggtaaactcaaaatatatactccctctatttgttaatagatgacaccgttgactttttcccacatgtttaaccgtaccactcgtcttattcaaaaattttatgcaaatgtataagatatgaatcacacttaaagtactatgagtgataagataactcataataaaataaattataattccgtaaattttttgaataaaacgaatggtcaaacatgcgagaaaaagtcaacggcgtcatctattaaaaaacggaggtagtactaggaaataagagacacaaagatatcaagtgtgatatggattctcgatttctacatgaagataaatcgcatgaaaacttaagggtaaatagctaatttagtccctcaagtttgaccgaaggctcaatttggtccttcaggttttattttgtccacataggtcctataagtatttgttttggcctaaaatcatccttgggtccacttaatatgccatatggctatttttagtcaacaattctgttagaaaatatcccttttgcccttaatttctatacaactatacactagaaaaaaatccaaaataaataaacaacattgcatatgtacttcgcattattttaacatgtgcacatgaaaattgagtctaatggctatcgtatatacttgcaagtacataatttatttttattttatctataaaaagaattcattgcatgcatttttttctcttatatatgtgaatgagggggcataagtgtcatttatcaagagagttgttggttatgtgtgttcaaggataagtttgaattaaaataaaaacttgaaggactaatatggacacattgaaatattaaggactaaactgatccttgcatgaaacttggaggactattttacctattcacccaaaacttaaaatgagatgtttgattaaaaacatgagtttaatcaaacaaaatttaaccaaaatctcttatattttgtgatggaggaaatatttatttagcaacaaagttgctaccggaattgttactaacaacttatattgaaacatattttctttgaaattgcttacaaaatcacagtcaaagtttataaattcctacttaaaaagtcgagtatagtatttttttagaagtattattatctgaattattaccgtcgactatagtgcacgtaacaatgcaatcacaaattaggctatgtttggcataattccaaatccatgattctgtgaaggtattcatagatttagaaatccatagatgtggatgtgtgactatactgatatcagttgaataatttatttgttcatatttatagaaagtatacatttcaaaccaatatagtttaacttgcaaactataattccagtgaaggtctcatatgaaactatgccaaacaagaccttaatatctgaatgactaaaatatcccttcttgaagtgaggtctttttctatacctaatccaatactagtctaaatgttcaaagttttcttaaagattgactgaaaatatatgtttaaaacaatatatttagggacagagagagtacttatgttttcatttaaactgatatcgggatgttcagtacagccacaactgcagccagcagctgccacaacagatcctcttgcctttttttatgaactgtagctactggctgcaaagtagcattaccaaacacccttataacattttttggcattcaaattgtgttttaaaattaataatatcttcgcctacattcttgtctcaaccaatcataacctttcacattttaatttcttcgcctactttattttctcaactaatcatagcattctcttgtttagtttcacctattttcttaatacatatccaactttaaagctttttatattttgggatggaggtagaaatacttttccttttatttacctatttgactctcataattaggtggacacaaatcttttatgagagagagagagagagagagagagagagagagagagagagagagagatatcctcataagaatgcagagttctcctttagtcagtagaatgtgcatgtgcatacttcagagtcatcagaagttcttaatatggtgatgattcaatgttggtgaatcttggtactacttgtagacagacaagatcaatgaggatattaaagtttggccgactgcattgaaaaaaatgcagttgcactgaaatatgcagttgtcagaaaagaagggcagggcaattaacaacacttgctagcaaaggacgtttttctttgaaagagaacaaaagacagacataagatgcaggtagtggatagccggtattattcgcatctgaatctgaattcactaaaaatgatatgggagatgatgcgggaagagttgtatattttcgaatgtatcgtattatcaaacgtataacaaaatctattacgaatctatttataaacctgataaaaataattaattaattatttatgagttcacaagtaatattacgtatttttttccttgatatatcattggataattcttttacactctaattgcattcctaggtttaataactgtggtttagagatatatcatcccgaggaaaaaaatatactccctccatcctataaaaaactagtattagatgtttagatgttgtactacaatatgccacatctagttctaggatcatttttttttgggacggaaggaataggatattacatgggataaatgataggttaccgaaactatctgtgcctgcctctaactacaaagaaaaaaaattcgaggtataataaagaaataacataatccgatcgtacccgaccagatttcgatccgagacccgggcattgcccgccttacttgggagggcagcaaacaagatcatatcacattggtagcaactccatttggttacacacttacactgatttttcacccagcatcacaacacactactccagcaatccaaaaacttttcagcatgcacgaaaaagaaaaaaaaagatctactcctctgcagcagagtgttgtctgaaagttgttttttctttgggcagtgaggaactgcataagcaaagaccataatgctggaatcttcagggacaacatcattgcattgtgactgtcactgctggttgttggagggcaggtgccaccctctctgtagaaccatttgtttgcatatgtgggcagcatctggggacatcctagctgtaaacaatggagtttggaggcttcattcttttccctccattttcatgtagtcctatactagtagtactcccctcgtcctataatatagcaatatagtattagaatgtgtcttatctagtataagttttcaatgttttggagcagtatttttcaaggccttcatgcatgagcatcattgcatattatatgggaaactattttgatcccttcagaggatatcccctcgttatttgcatgtcactcaaatggttatgaaaaaaattaaaaaaatattgagaagatgtattaatatgtaatatatcactccacaaacatgtaagttcagattcaacttttacatctcgtaaaaaaacaaattaaactacagctaattaacgcatatttacagtcaaatttgtttttttgttgcgagatgtagaagatgaatttgaacttacatgtttgtgtagtgatatatcatatattaatacatcttcttaaattttttcttaactatttgagtgacatgcaaacaacgaggggacatcactcgagggattaaaatccactcccatattatatggcatcacacatcagtattttttttattatatctttcatgttctttagcaaaagtatgttagtatatccttgacagatggaactctgatgaaaggctggaaagtactcttgacaaatcatagttataacaatgcgcttatgattagaatgtccatataacacagaagaaaggcacatggctagaggctgttttatacctttttagattaacaaaaactgggattggcttaggttcatttttcttactactagaagtctagaagtagaagaaaaataaggtaaagctaagttgatacctacatttttttaaaagttgagaattaatatttatgatttaacaaaaaattggtacttgagcagggctgtcggctacatcaattttggtctgatttcactgtaaaaaaaacattcaggcatctcaactttcaaatatgccttagcacaactttatgatataaaatttcggtgttccgaatgtttgctctacatttacagagcgcttcctgtcagactcaaaataagcaagctgagacaaaatacgctacaagatgaatcctgtaaaagaggatatgctacaaccgatgtacagatgatgagctctctccaacaaatgacagacacaattttgtaaattacatataatgaacacttcctatacttcacataaaacgagtggcggcaaaacgcttaaaaatcagcctcccatcgatgtcgagtggaacttgtgaggattgagatttgggaacagcccgtggatatgttcttcgacgaaatcatgcctcgtgagaattccgacaatgggtggcctctgcagccaacaggaaagggaaaaagacaatgtgttgtcatacaagttgctccctcagtttctttttttcataaggcgtattttaatttcagaaagtctttaagactaaactttgaccatttatttctcataaaacatattcctaacagatgtaaaaccaatgtagtatgaaagtgcttcgaaatatgaatctaatggtataagttttatatactaaacatacttgtatgttaactaataagtcaaaatctttcaggtcaaaatacgcttaataaaagtgaatgaagggagtataattttcaaacttagcctgtaataacaagacaatagtacgtgtacgtgtattggaaaacatcgtatatgaggggtaaagtttgatcttggcatgtattgaaggaataatgacctacagtatgactttaactgccatgtaaaaaataaattctagaatgcagatcgcagatacgagatagcgaatagaagcacagaaatgatctatgcaaggttaagtaattgaatcacttgtaagcattcctaaatctttactgttatttctcatgtaagtgcattccatgcgtgacttaatgagtgtgagagtacttacatctggtgtctttggcacaaccaaaaggtgcctcaatcctagtgcacggaataggattgcagcttttgcgagtgacattgtctcaaccaccgtataaggtgaggtgtttgtaacgggatggagatccacatacatttccatctcctcatcagtgaagtccaggtcctgaattttcaagcctttccctgaccctggcttggcaaaatcaaaggcaccgaatctttgaaggacaaagctaccactagttttcagctggtctttcatgaacatcttgccattcagcaaaaccaacagatgagaccttgtcacgagcccgaccaattcaggtgcttccgttagaggtggctcatcaaccactgggaatccattgtggcctgtgaaccttaacgcatggacaatgtttcccaccttctcgacacctgaaaacgtaataagtgggccagacacaacatcgccagcaaccaagtgcctcatgtatggttcagcatgagcctccatgtatggcaagcctttcattaccactatctgatcataaactcctttattaaagttatctgctatagtcttcgatatgagaagaacaagcatgaccagagggagcatggccaggtcgttggtgagctctagaaggatcacgcagactgacacggtcattctcattgttccaccaagaaaagatgctgcaccaagaagggcaaaaagaccaggatcaaggtcggatatggatccaagaagtgtccccactatgcgcccgtatgttgcaccagcgagaataacagggatgaagagaccggatgggacggcaacaccgtacgtcagaattccaaggcagtacacagcagtgaaaaagatgaaaagggtggacatgtggaactcagattcagtcccattgctaaagaggttgcggatggcatcatcatttgtattgaaaaagagtgatgcaagatcattgtaatgccctggtggacattgaaagttcttgaagttaccagagcgtccaatggtaggacattgctccacagcatccacgggacatggagtgcacgcagcaagccaagggagaccataagagcacattgatgtgataattgatattgttatagtgagaaggatcttgaatggagcacctctcctgcaggaatatgaacaaagcagaagatatcacatcttaattagcaacacaagcagaagaggctattgcaaatccatttgtaccaatttacaattgctacatagtacttactcgtttatgatactgtaaacacggagaaccttgtccaagagaaaattaaaaaggcctccaaagattccaccaattattccaaggataattattgctattagatctggagtactgtaggttgcaacagttgaactgagatcgaacataattaatccaccttgcccaaagagaccgcattttccactacgacagaactcaataagagatctcaacacgacagcaacaacagccgttgtaaagaacgccctccacaaaagagcacttcgccacctataaaacaagttatgaaaaactatcattaattgtcatgttggcatagaaagttttgatgacaaaaatgcaaattaattattgataactatggaattatcaaattctttttgagtttaaatctactgatacagccatataactacatgtccaaagaatggttcttgtcaaaaaaccaaagacacacttaacatcaatattagatacgaaagatgcatactttctttgtctcgaatatgcaatgagcatatcattgcattaatagaagaagaaagatgcatactgaagctgattgctgcagactactattgttacaattttgtaaaatcccagtgataatttatttcataaaaaagatatcacaggaatggcagacaagtcaaacaaagaaaatgcttcattcaaaagaaaatttatagcttccaaggaaagaactgctaccatgatgctgcttcctcaagagcaaataggacaccaccaacaggagcacggaaggcagctgccactccagctgcagacccgcatgtaattaaatcccgcctatccctgtcattcttaaaatatcttagccaattacatgtaagccggtacttgcgggatcctccctgaccaagcaagttggcaatacatgcccctgtatgtaccataggaccttcctttccaagtacaaatccagctgaaactccaagtattgaaccaaatatctacaaagtagtagaacaattagaagatgagattctacagaaaccagaacccacaattgttacttgtagaatttgtaaaaaattatcaatacagacgtacataccaactgcaaacaggttcataatacttccaacaatcaattataaaaacagtcatatccactgtaagattttcaaacttaatcagctgtagaattttcacaaagggcattcactagaatctactaggtttctatcagcacagaaaagtgagaatgaaccggctataccactttctaaacctgcagctactagtagaaatcagtaaaacagtacagtattttttttttgtactttagtagtagaatgacattggatatttcaattacacataggctccatactccctccggttccatattaattgacgttttggacaaggttgtggtcaaacttttttaactttgactatcaataactttaaaaatatttagtttaaaagagctagaacaacatatatagatttgtcttttaaaagtaaacatgcatttatttattatatatattatagtagaaaaataaggtcaaagatatatcttgtagaccgtgttattgtccaaaacgtcaattaaaatgaaaccggagggagtatatcattatctctcagtgaaacttcacactacccacgatcccacaaaacatatgcaccaggaaaataaaaggtagaatactttgttttacgaaaatatttatgtaatatgatatgaacaatagtaagcaatggagcttagcgatcccatgatcctatttcacaagttaattctgggaagatacgcaatgcatctgattctaagttagatataccttcacaaagagcgtactgggggccaatattgaatatgcatcaactccattaagatatgctttaacttcgggaataccagacccagcagcagcaggtgcaatgtaagcacatattgctgccgctgcagctgctaagaccaaattgcaacctccataagcgaaaaatgcagttaaatacctgcactggaagcaagccaccattgattacttcaaataattccgcagttgtaaactattgaatatctcatctctattgattattttgaatcattacaaagttgtcattaataaatctctattagcaacttcatatgctccacagctacgcataacacaagcttttctactatatcgactcacttgttactgcttgcaacaaagaaacccttgttttctgaagtaatgacaggagcactgcctactgcaacaaagaaacttaaaagactgttttccatgaccttagcaacatatgaagcattatcacaatacaatgtataaaagtgtagcaaatagccgaataatgtattctacagctgtgatgagttataaatcatcagcaggatctgaagcaatgtacggaaaaatagcaaaaacagcaaaatagttctcccatcaaatgcaaaatgaaaccttacctttcctttagcataagattacccgtgagcaacagtttgaatccagcaatgttttcaactgcaagattgttgaagaagccaacaagtccagtcaacaggccaataagaagcaccaaggtccacttcagaacaatgtactgaaatatctgcttcttctttcttgatcgccagtcttgcttgaaaaggtcgttctcaacaactctgaaacataaaacatatgaaggatgtaacagatggactaaagtgtctaatacaaatgtttgatacttgcatttatctaggaatacaggttcaagttcactttggcttaaaaaaaaagccctctttggatcaaattttggttcttgttcatcttaattaattaatacagttttcctcctacatgatattagtatctacacatgtcctttctctctgcaattcattcttcagtaaacatctcccaaataagaaaaaaatcatctaatgaactgccgcgtggtatttgcatgaaattttatctttcaaattattggttctgtactatcactgcatttattcttcaaaaacaatgtctaaattgattgatataatccattgtagcttccacctcttttttcttacttcaaatgagctcctagtaacttcgtttccatactcaataatcacccaaagaaacaaaagggagtactggttatttgaagtacaagccagatcagcaaggagctagctaagggaaaagctagcattcggctacccgagattcgagattatgtgctaacatcgcctcgactaatcgctaatgacatagaaacaagaatcatgttttgcactattccccatcattgaaacagcaataaaagcacttgaatttgcaagattaatccagtaaagatcaaatatgtctcctaaatgcaaccgaaccacctaataaatcacccataaatgatgtaactaaaagaacaaaagcattgagcagatgaacagagggcgcgcgaatgcgtactcgtagtcgaggctctcgatggggcagacgttggcgccgacgatggcgatctgggaggtggtgttcatggtgcgcttccgcagcagcggctccccggcgctcccgctgcggccgccgccgctgtcgttgtagcggagcagcgcccccgacgacgagccgttccgccgccacagcccgccggacccgtccgtgctctcgatgtcgtagttgtggctcccctccctctccggcgcccggtgctgcgactgcccctccattccgccgccgctcgccgccgccgccgctttggtcagagagctcttcttcttcttcttcttcttcttcttcttctcttctccgcgagactttctttgcttggcttctctgcaatgtatacaggttaggaagaatccaagaggaggccaagattaataattattattagaggaaaaaatgatcatgtgtttgatgatgggaaatgatcttaaaatgtttttggatgtttgtatattttagaaaatccaggggagttatcttgtgggaatagtatgcttttttttccttttcttttttttgagtatacaagtcagaggtatgtatacctatcacacttctaaatgtgattggagacatgccacaaatttggcaatatgaaaatattgatcatctatttggtttgtagaaaaaagcattgtccaattttttttttaagaattacatagtacagacactcacaacgcatgcgtactcacctcacccctatgaacacacgcacgcaaaccctgtccctatgagtatctttgagtactagaccacaattatttggcttgtttgaattccaaaatgcaactttggcgtcaaaccatacaaagcccttgcccttttttttctttttttttttgcaatgatcaattattaccactggaaaaaaaagggcaagtctaagaataacaatgaactttgaacgctacacatgcatgtactacaaaaatgctccgacttctatgggcattacggtggattatgataatctcatttgtaccaacaacttttacacattttggtgtttggcgaactggttttattttaatttatattgcaaacgatatattatagtctaagaaaataaaaatggggaatcatgaaaattgaaaaacatattttatctatttgtaattcgatcattgaattaaaatacaataagttcaaattcctacatcaactttaaaaattaagcaaagcacagcacagcaaccacaaattgagcctcttgaggcatattagtggtgtatcctcatgatccttacctcgccctgtctgaccataaatatttgatatttagattcaatttgatcaaaattttaaaattctggctaccaataattcatcaaattcttagtttttttcaaaaaaaaatataagtagatttgtcttgaaatgtaccaacataatatcataaaattatatccataaattattccaatataaaattgatggttaaaattttaaaagtttgatcagcaagtgatttatggtcaatttataaatggttggagggtgattaaagacgttttccacaaataattcattaaggcgcaatttggaaatttttagttcaaagttttgctttttaaaaaactgtaaattgtctgttttagaagattgaatgtacgtcagacaaacagagagagaaggcattatgcgatgcgtgctagtcaggacaacatgcggatgcggggaccggacgttcagaaatggacggcgcagatgtggccctaaaatacgggcccaccggggactgggcaacgaagtacaagcacacatggcgactgggccccactccgccgcctgtgggtcccagaagccacgtagcgtttgattgggaggctgactggcgaatgcagatgcagccagtggatgcaaaactgatacgtgtacacatggatggaattttgcttgtgggacccaccaaacatcaacgtagactttgttttttttttttgcctggtttagttcccaaaaattttacccaaaaacatcacatcaaatctttagacacatacatagagcattaaatatatattaaaaaaactaattgcatagttaatgaggaaatcgcgagccgaatcttttgagtttaattagtctatgattagccataagtactacagtaacatacatgtgctaatgacggattaattaggctcaaaagattcgtcttgcggtttccaggtgagttatgcaattagttttttcatttgtgtccgaaaacctcttccgacatctggtcaaacattcgatatgacacccaaaaattttctttttcgaactaaacatgcctttaagcatcccgattcggtaatcaccaaaacaagttcgtccaaaaaagttcctttacacactaacctgctattttcacagcatattgatcacatgctttagggtttatttggtagagctctagcttagagccaaccaacggagcaaagcgagttagagtgaaatggaaaaataaattaggggatggagcagggtcgggccatttcgtagctccattcctgaactagatttgaaagttggagtaatcccaaataagcccacacactagtacactacttctcgtggattgctccagttttattttagctacagcaacagaattttcatatgttgtttccttttagtacttcactacttctagccaaatggaatctcagcttgacatggaatgcccaacattactgcattgtcatgaatatcatagaatggttctacaattagattaacatctttagtgaatttcatatttcttgaaacaatatcatgatatttgcgatttaatttttatgtgtttgtgttactaaaccaccaatgtgcttatgaatataggcacattgttttctcggaaatgatcgatatgtatcttttagaatattttgaatttaagaaatataaataggcacacatattgtgtttcaaatatgaaatagttttcacgttagtgatgtaccaaaaaaatgctacaatgacatagcatgccgaagagatattattttaaagtaagatatatgcgtgttttactttaaaaaaaagcatatgcttgtttatttttaaaacaatctttagaacccttaatatatagggcctttgagcatatacaagtaatagcactatattcatttttgtcaattctacatctaaacattggatctcttaattgttctaattaactagctcaaccataagtttaataccaacacacaataacatttcaatgctagccaacagcatgcatgtgtgaggctaattaattagaacctcgttcaccattggtataataaaatttgacataagtgtgtcatgtgccggagggtcatcatgcgaataacgtgtaacatcaatcatccatggataaaataacacaaacttccaaaccaggatatgaccccaaatatgtttggtcatttgattaatagtttacacattaggatactatggaattccaagctggcttggaaaaaagaatatgaagacaataatagagttgcaacgcaacaaggatgatgtaggaggagggggacaaatgagccagttggccgtaagttgaatactaatttgaaacaagatgggttgtcaagatttcttgggttattttggtcatataccaaccacgaaaaatgtgtgtattaatatttttctgtattggatttttgaagtgtcaatttaattagagaattttcttctcctatgtttctttttcacattgaaacaaatgataatggatgatgtatgtgaccattttcactttgccaaatgggttgatgggtgttattgcatcgtgtgtgtgtggtcgtaaggggatttcaaagaatttatcaaaccaacgggttcatgaaaaaaaaagtaggtagagatgtcctagtctaccacataagctatcatagttcggcaaattgggtcactgatcatcatgaatcgctagactagttttatgttttaggttaggtgtaattattagaactataaataaaaggaacatgtttgaatttgaactaatataccgagttgtttctgaaaatgtattgttgagctttgtaagttaaccatagcacatttattatgtagccccttgagatacgaggtaggatcagagtacctctcaaccagttttggtaaggaaggtttggtatgcgtaggatcgaccaccagtccattcttcttgatgacgaaaggaagtgggcccactgactgagagatgggccgcagccaatggcgtgcagacacgttggatccagcttggcttcactattccacccccaataatcggtgatccaatcatccaaaccgagattgccatcgtgcaaggagattaacatactctaggtaaattctaatctaaaccacaattaggttttttttttccgaatacgtaagagagttgaatatcattacattaatctatacatattatataagtgttacactaggaatgagaaaagggcgtccaaaaacacgctagctaatgcaagaatggttagacgaaaataattgagctttgagcacaaaaattatgacttaattgattggccgaatacaccttggcgatcgaaaaggctggattgattaatttctgttgtcgaaaaagaaacaaataacaaaacaagtgcgatcaaaacaaactaaaaaaaaaaacccagaagcataaatttgcagcaaattaaacaagctgctgcaatgcttggggaattggtaatatggtttcaggggatcggaagcctgaaacagtgaggaagaagagtatatttgatatatgtaagctttctgcttgcaggtatccaattgtattacagatttgcagggatgatgattgtgttcttaccttacaaaattcgagccttggttgaactcagatcatcaggccacagtaaaaacttcccgagattcagatcaagatgatgatcctcctttctcttctactgcctctctgaaactctgaaactctaaatctctctctcaaactattgctttatgtctgggtgcttatatatatctgcagttcaagtgagaggctgagatgagagcaggagggaaaaaaaaaaagaaaaagaagacaaggacagcaagttgtggatgatgggggagagaagtttctgaagaaaatgcatacaagatggaggagaggaacagtaataactcaataaagaagagtgacagaagccatcgatcgtctgtagaacgtagcttcactccatcgctttggacttgccacactcattgcccatcatcagtatactattattactcctcgcaaaaaaaaaagtatactattattactactatatatcatgatgcagttgcgtgattgattgatttcttggattggtttgtcttgctcatgccatgattaatttttctcttccgggtttatagaggacgtgctatgtaaacatccacgaatgcgtcgatggttatggtcgtttgagctacggctgataagtcacaggaaaataaataaacaaacaatattttataaatatttttttatatctatgttattggtagtttaaaattcaatgctgagaaatagattataataaaaaaaataaaatgcatttcaaaattaaatttcgaaattttgcgctatggctggataggctagtaagcagacgtcgtctttactaggttgtacttctcctggatattacatggacatagggcctattcacttttatgccaaaaaaaaaccttaccaaattttaacaataccaaattttggcatagttgtctaattgctaaaattttggcaatatttcttatatagttatcaaaatttggcagcaaactaaatgtagctatttttttagtaactttactaaaatttgataagattaaaaatgacattaaagtgaacatgcccatagtatatacatgtacaggaataatcatgtggctcaaatgatccaaatggacagcactgatagtgccaagactatcggccctattgtttggctccttcgtggaataagccgaacaacgtatttgaaaaaaaaaagtaatttgtgaataaaatttttatatatatgttcttagctatgtaaaagtaaaagctggaaaataaactgtgataaaaacaactctaaaatcaactccaaatttaatgttgaaatttaaaatttaactgataagttattaattccttttccacaactgtattggtataagcaacttgttaattaggcgttaattcttcaattcgagattctaattatgcatatgatcccgtattgctttttcttttgaaccaaaagaaagaatttggtactggttgttgccacctacgaccctcgcgcacacttgttatgaatcacgcgagctgaggtagttagatggtgatccaagaattgaatcttatcaattaattaatggatgccacctagatagtgatgtgtgtaacacgcgcactaagatggtcaaatcaaatggctgggcatgtggtatttactaatattcaatcagagtaaggctgagttttatatagctgttgggcttagctagttagtgaaaaaaaaaataaacaactgatataagataaatttaatagcattgtctttggtattaacatacgtgctaattcaatctgtccttttttagaataatgtgataattaaatctgtcctgtttttagcaaaaataatgtgctaattaacaatattgaagaaaaagatcatgagaacgccaaaatacactaatttttcacatgaatagatactaatttatccttgagctagtacttatcatatataaaagaaaaaaagttacacacacagttaagctcgtgagaagtttgagctcggctcgacaaagctcgcaagcttgcagctaggctcgggtttggctcgctaggagttcgagccgagctcgagcagcttgcgagccttgagcttttttgacagccctaaccaaaattaccataaccttcttgcaaagagaaaaaaaacacagaacctgtgggctgtagttactagcaatgaaaaagtttagtttagtttacgtcccatagcagcaaatccgggcttgaacttgagcgagccggatcgatccatccacccccacgatccaccaccatgcgcaaatcggagctaccaccaccgcactttgcctctcgaaattggatcctaaattgaggtctcgagtgaccctcccccgaactctaattgatcctgctgatgacgtgtaggatgtggaggacgctgcggtcatcggtgtgcctttggagcgtgctcgacctccgcgctcactagtgcgacgctgaggttgtaggttgcgggagggggatatgggataaagaagagagaagatgtttcactgacacgtgcatcttatgtgagtttttatttttgcctctggcatgacgtcagctgaaaccatcataaatacacttttgggggctatgcttgcaccagttttgaaagataggtatgtgttatacccattttgtggtctaaggatatcaactctggacttttgcactagcaagaactccctccgtcccataatataagggattttgagtttttgtttgtattgtttgaccactcgtcttattaaaaaaatttgcgcaaatataaaaaaacaaaaagttgtgcttaaagtactttggataataaagtaagttaaaaaaaataaataataattcaaaatttttttaaataagactagtggtcaaatagtacaagtaaaaactcaaaatccctttcattatggatggagggagtagcaactaccgatcgaagttaccggcaaatatggtccgaaattatcactcttacaggccaaatttatcagcaactacgaacggagtacggagattgtcaatgccaatgggcaaaaatttatgagctaccacgggataaaattaccagcaggtacgggccaaaatcacaagcagccattaaagtgtaattaatgggcttcttttcgatggctcttgttgggcttaattaatgtttgcggaaattgggctctgtttaatttgtggtgggccgatgtcaaaggagctcaggagcaggtttgaaatgaaatgtgaagcatctttgtttcttactaaagtacgaagtgaaaaatgctgtgcaaactgaaatgaaatttgaatgtgaagcgtcttataaatactactccctatgtcctatgatataaggaattttgagctctgtcccatgatataaggaattttgagttcttgctttacactgtttgaccactcgtcttgttcaaaaaaattttagatttattatttattttttttgacttactttattatctaaagtattttaagcacaaattttcgttttttatatttgcacaaattttttgaataagataagtggtcaaacaatgtaaataaaaactcaaaatctctaatattatgggatggagggagtagtataaacaaaaatgttgtgcaaaattgaagaaaaaccaaaaaaaatatgcaattcttttttcaaaaaaacgtggtcggcaggattcgaacctgcgcgggcaaagcccacatgatttctagtcatgcccgataaccactccggcacgaccacgcttgctgttcatccttcttctcaaagaatctcatatccccgcagtttcaccgataaatttctcgcaatcccattgaccgcagcagcatctgcagcagcggagcagatcggcatccgccgcttcctcctcctccggcgatggcgctggatcccaaagccaatcacgctgccgctgctgctgcttccgccgacaaccccacggcggcggcggcgaaggcgaaggtgaaggtgaaggtgctcttcttcgcccgcgcgcgggacctgacgggcgtgacggaggccccggtggaggtgccggcagggagcacggcgggagactgcctcgcccgggtgctggccgccttccccaggctggaggagatccggcgatccatggtgctcgcgctcaacgaggagtacgcgcccgaggacgccgccgtcggggacggcgacgagctcgccatcatcccgcccatcagcggcggctgacaatctttccacttctccaccaccctccccccaattcgaagacacgggggcgcaaagagagaagaaaccaccggttctttcttttgctttcctcttctttctacttgtttcctgatacaatttcaatcatacaatatacgcaagtttgagtaataagcatcgcctgttttcgcgatgataattgttacttggcatcgttgtccttcaatcatgttgatgaatcttgaatcacatttcgatttgaagtgatatatgtgtgtgcttcttgtctcttgtgtggacttgtctaatgactaaagcggtggtaaagacaattgagatgaaatcattgtcatgaaacaaaatcgatttaaacttcagtgcatgattgatcagtgggttactgataataataaagctaaagttggaaaatactccaaaagttggaagcaaatggtgcagataaatcatgtgattttcggttgggttcttgtgttgtgcctcatggcgtgacttgtggacgagttaagggaggtcagtggtaaaattaaaatgatccttaggcaactaaaagagcaaaattatgtggattgtggatggtccaaattgatcaactggcagaagtagtggaggaataaatcatatttcctctccgctggtttcttgttagccacaggagagcagtggagggaagagctccttttcatcctgccaaaacaatctcagcaaaatcagtccacgcgttgtgtagaccaattcctttttcttattgggtgtgttgttgcactgtttgagtgatagatcaattcctggtactccccccgtccgagaagttttagagttggacacggttattaagaaagtaggtagaaatgagtggtggagggttgtgattggatgagtagtggaggtaggtgggaaaagtgaatggtagagggttgtaattggttgggaagataatgttgatggagaagttgttatattttgggacaaatccttagggctaaaagttgttatattttgggacggagagtgtaatttttatcttttatgtgcacttcacttccacgttgtacatacatggtaggtgttgagatcattctatgaagacaaacaaccatcagcatttggtgtggtctttagactaggataggtaatgagttgactttgacagttcttccatagcgcaacatcctagaatttcctgtcttcctcctctacttcctctttactcaaacctaaccttgtttcacttccatgtatgcctcttgcctgagcatgccatggctagtgctacttttggtgcaatggactctgtcctcagcaagctcaccgacttgctgaccttcgaatacaagttgcttgaggaagtgaaacgagacattgttttcgtgaaatctgagctagagagcatgcatgctttcctaaagaagatgtctgaagttgaggatgagcttgatgagcaggtgaagtgctggaggaaggaggttcgggaactgtcctatgatatagaagaccacatcgacgagtttgcggtccacctcaaagatgagcccggatgtgagctgcatggcatcccaagtttcataagtcaaattgtcaaatcgatcgcgtcaatcaggaatcactaccaaattgccaaggagatgcgaggcataagagcctttgttggggaggctagcaggaggcataagagatacaaggttgatgatactatctccaaacctagcaaggtgactgttgaccctcgcttgcctgctctgtataaagatgcatctgatcttgtaggcattgatgggccaaaaattgagctcatcaggtggctaacagagggcgtgagtggccctgaacagcaattgaaggtggttcccattgttggatctggaggattgggcaagacaactcttgctaaccaggtgtaccacaatcttgaggggatatttgagagccgagcttttgtcactgtttctcaaaagcctgacatgatgaagattttaagagagatactttctggaattgggtacaatggtctcgaagctgcatgggatgagggtaaactcattcatgaagtcagaaaataccttaggtttgtcaggtatgtatatccattctagttgtattcaaaagtcaaaactcaagttaacacattagtttaaagcactcacaatgaagttagcttgcaacatatggttgaagagataatatccgccaaaaaaaggttcattgcatcatacaccttgacgtagggagattagtctgttcctttgtataataattcatctttcgctttggaggtttgaaatcttgataataacttcaaaaatgactagcttttcattatttcatccagatatcttatttggattgaataaaatttagtgtgatctttcaactagtttggatgtgatgttcttggttgttactgtctaacacccttattggttatgtgccacttcaatattttttttttaatctttgttactctgttaccaattatttcacccttgacaatgttttgcttggcaggtattgtgttgttcttgatgatatatggagtatttctgtgtgggaaatattgaggtgtgctttacctgagaacaatcgtggtagtagaatagtagttaccacacgtattactgacatagctagagcatgttgtgcaccacgtcattgtgatatctatcatcttaaaccccttgataatacctcctctcgaaggttattttttaaaaggatatgtggttcagaggatagtttgccaagtcatgtaaagggggtagctgagaagattttgaaaaagtgtggcggtatgccattagctataatcagtatagcttctttgttggctactaaagcacagacaaaggaacagtgggagagtgtaaatatctctctggaatctggactagacaagcacattggttttgaaggaatgaactggatattatcactcagctacaaccatctcccacaacacctaaaaacttgcatgctgtacttatgtttgtttccagaagactacattatttcaaaagatatactggtgcagcaatggatagctgaaggatttgtttttcctgaacatggacggaatttagaagaagcagggtattattactttaacgagctcatcaacagaagcatggcccagccagtagatattgagtacaatggtgaagcaatgtcttgtcgggtccatgacatgattcgtagtctcataatatcgaagtcaaatcaagaaaactttgttaccatattttccacatcagaggctgcatctgtcatgacaccagggaagattcgtcggttgtctgttcagtacatcgatgaagaatgtggcatggttccaatgctgccaactctatcacatgcccgctcatttagtatttttggacattgtaataaaatgccttctctcacagagttcaaagttttgcgagtgttggagatggacgattgctggaaactggagaaccatcatcttaagcatattgggaggctatctcagttgaaatacttgggacttagaagaactcctatcagtgagctccctgaacagattggagaacttaaatatttggagacattagacttaaggttaagccatttaacagaattaccagcagctgttgttcgacttcgacggttggtacacctgtttttcgattctaacatcaaattgccagatggaattggagagatgcaatctttgcaacaactgtcatcttttgatgtttgtcggagttcaattacctcgctacaagagctcagtagactatccaatctaagggtactagtgatgtcttggagatcctttggtatgattggtgatgtcagaagctacaacaacaatctggtctcatctcttggtaggttgggaacatgtagtctccggtccatatacattcaaggttacaacagttctctgcaagatttctcactggatttatggtgtcctcctccatctctcctgcaaaaatttgttgccaataagtgtctcagtgtgattccaaactggttgggctcacttatcaacctatcttacatcaacgtcgatgttcttcgagcggcacaaagagatctggatatccttggtgagctacctaaccttctctttctcaggctaggctcagaaacagctccacaagaaagactcatcatccgcgaccagtgtttcgaacacttaaaggaattcaaatttatttgtttgctcacagagggactggaatttcaagtgggcgctatgccaaggcttgaaagactttgctttcagtttgtagcattggaaatcatttatgcaactggtggttttgattttggtatccaacacctgttgtccctcaaggaagcttttgtcaagatagactgttttgctgcttgggctggagtaggaaatgctgctgaggcggcgatcagaaattcagcaagagcactaccaaacaatcccttgctgaacattgagagattcagtgccaatgatgatgacatggaggaagattttggttttgttgttcttgggcggcggatgcagcaaagaatgccccaaccagagacatgatctttgccaaactggaatgacatatatacgataggaaaggtaaatgttttttatatttgctttaatttgaataaattaagtactcagataaagttcaaattatccatttgacaaatatatctcttgttaaccgtatgcttattctgttgactccctatgttttgaaatatatgatgtttgactatttgttttatttacaaaattggtgcaattatgcaaaaaaatacaagttacgcttaaagtacctttgattataaacaagtcacaacaaaataaatgatacttgcacaattttttgataataagaacattcaaacgtcatatctaaaagttaatagcgtcatatatttaaaccatttaaaatggttttgaaatagagttagtagggttatcatgagcctatgatcccccacaatgctaaatttgtactgttcaggtgatgctagttgttcaaactaagttgtgacaatcgtaatgatacttgaaatctccttatggaaggaaataaatttggtgcttcgcatatatttttgcctaaaggaaaaatatctggtgcagccacatgcaggtactgggcgtgcaagcagaatgagcgtttgggaataagagagtggaacagccggttaacgagtaatctcgcagccattcctgacgaaatgcagcccaagcttgcaacttcatattggaaaccagatgagcagtcatactacgtctacctggcttgctgatttccttttcttctcctagcagatgctgttattgtactgtatatgtctgtatccagtattaagatgcgaagcataactccatctccatgttacctcacgaatgactgcagaggaatgtacaagtagagagctgtgctgtggtcaacctgcaggcagtctgaaggtcacaaagtagaaatgcacatgaattcctgacaattttacaacgccctgttcttgccggcctcatgttacattatagctcatcaaactgaaatctgatcatgcaaaatatagaatccagaggtaagcacagctgtcttgcattcatggtgacaaatggtcatcacaccattgcacaaaagatgtaaagtgcatatagatctgaagaatttagctttcactggattgatggtgggagaactgtaacactataataaacacatacagagcaactgacaaaagtccaggactacactgacacttcagaacttgacctaataacaaggcaaatgggtaaaaaaaaaaagaaaggggggggggggggacaaaataaacaagatgtggtatggcagcttagaaatcaaaaggaacatctactatctcaggcatcgacatacattggtgccccgacgagaaaaatatcggggcaaataccaactcagatgctcttgctcttactagtgttcctcatgcagatctgctgctaactacgtaacacattatcttccttttatgaaggtttgtgtaggctggttcatcttttattgaaccattgaccacgggaacacagcaccagaagaagtcctcagcataggtatatgtcttgccacaaagaaggcttcgttgagacgagctgtacggtctgcaaactgagaggctctctgtattgttcaccaccaacaaacataagacatggttagacacttcagggctcaaaagaaaggaaaagataaaaaaaagatgaagatataatctgacaaagtaatagtggtattagtgcaaacattggcattgactgcaagagagcactgaaactgtcattgattagcagttgaaaaaaatgcaacagacagctgaacaaacaccacttagttgtgagccatttctttcttttagaaatatagtatttctccaatattaaattgtgcctttgtcatttcttcacatctgaaaaggatgacgcgtcattttgacagggaccaaaagcagcgctattaaccttccaatatctccatcataacatggatgggtttatgcatgcatgtgcttcgtgggccggtggataggtgctatgtatctccttttaatttgcaggtgcaactgtgcaagcctcttctatatgcctatgctgattttcagcaaacagtaattctactctttgtcctggcttggcatagaactcctatgactaaacagtaaatatacccctaattcaaacccatttaattgcataatacagtacaagttttagctagtcatggtcaaagggtggctactttgtcgtgttagttttagtaccatatggaatctcaaggcaacttgtactgaaggggaaaaatcatgcaaacatgagtgaaccaaaaccacttaattgtacaagttcaagtcagatcgattttcaactccaacactctacacccaaaacaacaagggaagttgtttaaaacagataaaggggatatgaggtgacaagctatgctaaaatagtcatcaggtcataaaccttgtcaacattatcacttaatggtgatcagtgaaatcataccaacacaatttatcagattctgaagaaaaagggatcaagtagtaagtcacatttgacaaaaatctccataatatgttggagccatatgttttttaaaaaagtcatggtcccttttgaaattaaactatcatgatttatgtgatttgatggcatacatgaagctggacttgtgtgctgattgaaaacatttcacatgaacagcatgagattgcttgagacagagatcacgacattaagctttccgatccatataaacttaactagtgcgtgcaagtgtagtaatctagtgcaaacattcatccgtatgattaaaccaatagcaactatgaagtccattaatcgagtgcagagacatgtattcatacaatagaatagtaatatagtgtcaattagcaaagagctcaccttatcatcaaatgcaatcttaatatggggaagtccccgggccttgcgcctcatcctgtacatcctcctccccagcacgaatagccccagcaatgcggcggcaatggagaaggaccaaatcggcttcaccttccaagcacagcattgcagcagcctgaacggcagcctccaccacacaaccacctgcttctctcctccatcggcaaccggggctcgcgccagaggcaaggaagagccatcctttgcctcaccatcctgttcaccgcaaccggaagcggcattaccgctgtcgacagcccccatcgcatcgcctaccgcagcagcttcagcgagtgagatttctccagcaaccggggattgtgccagaggcaaagaaccatccttcgcttcgccttccggttcaccgcagccggatgtgacatcaccactcttccattgcaccagcgcctcttggacaaaccccaatgcatcacctatttcagaagcttcaggaagtgagcttcctccatcttccacttccagttgcacatcggaattctccggtgattcgagtcgggataattctgcaaccacaattacgtcaggatccaaatcctctcccgtcccatccgcttccttcccctgctcaatctcccgctgagccgcctcctctcgcctcacctctccgcatggcgaggcagcggcaagaaccgagggttctccgctcgcctcctcaaccccgccaccgaatcgcaaccgctcctcgctccaatcctcctcaacaagaggatccaatctcccttccggaaccgaatcaaacccttcccccttccctttgtcgccggggtcggagaggagccccgaccacgagccctcctcgccggggaacccgtcgacgtcggagggggcgacgagggcgaagtggtcgtgcaggacgtccccgcctccgccgccctcgccgggcacgagcaccacgaagtcctccccgtcgtcttcgccgccgccgccgtgggcggaggcggcggagagcacctcccagtcgctgatctccgaggcggcgtcgtcgtccatggccgtcgcggcggtggtggcgcccttcgcctccggtggagtctagaaaaagggaaagagggggggggggggagtctgggcccaccgcgcagtgaccggaagggtgtagtagtcccagggtcacgagggggaagggcgaggcgaacacgtgggagggctacgcgacacgtctcgtgtacgtggtgtcactgacgggtgggcccagagggttagctccacgcgtggggcccagttgtcagagagggccggtagaccgaggggaaaggacagtgcgaatacgcgaggcccgatttatgtaacggaaaaaaaatctagtactcctacgtacagaacggtagacatacaagccgacgtggtgccgcctctgacacgtggagccctccctctatttctctctcttactaaaatttttcgctatactccctccctcgtaaataaaatcgttttgaacaacaacacggtctctaaaacacaactttaaatttttatttttataaaattatttattgaaaagagatatgtatatttttataaaagtatttttcaaaacaaatatatttatataatttttacaacttaagagttatttatgatttatatttttaaggtttgatttaaaaattgtcctaaacgatttcatttacgaatacggaggaagtatgcttcatgacaaccataaaatttcaaggtaaagtcgtatagttttcatgactgtcaaaccaaatcggcatctgaaaattcaaaaattagcgaaccatgggcccctttcgtcaacggcaaagctagtatactacccctactttctccgtcttataatatagcaacctagtactatataagacattttatagtacaataaatctagacaccctcctatttagattcgttgtattataaaatgtctcatccagtactaaattattatattatgggacggagggagtagctgttttcttcttttttccacacaatggcacaagaatcgatggagtacacgcactcacacagaccggcgtttcgctttcagcagaagaacaaatcaaacatttcggcagtataacaatttgccgacaaaacagtggagaaatcaaatcgcaatatatttagtgcaataagccgcccccttcttcttacttataaatcataattgaattatggatgttgttttgacattgacagaagtcacagaaccaatcaaaatacagtagcaactactagcaactatgtccggtaaaaaagaattccctaaccctgctcgtgttgcctccaaactttcgtttgccctgcaccagccattagccaagaagaacggccgtgtgtctaagagtctgaaacagtgaaactgatccaagaagtgcagctccgaagctgatccagaaaatcatccgcatctgcacttctgcaccgagctgattgttccgacaagatcgtcttcgttttcgtcatcgccatcttggcctctcctgtctgcagaatcagaccacgaagaaccgtcattccgtgacaattttggagaggatagcatcaatgatcaaatatatggcactgagatttgttataagggtagagatgttcagaggctgtttatgtactccctccgttccaaaaaaagacaaaccctgggtttccgtgccaacgtttaactgtccgtcttatataaaatttttttataattagtatttttattgctgttagatgataaaatatgattaatactttatgcgtgacttatctttttaatttttttcataatttttttaaataagacggactgtcaaacgttggacacgaaaaccagggtttgtctctttttgggatggagggagtatgagtttaggattggcagtcaaaaaagttcatggggctttctgtggagtgatcaatcatatgttaattgagtgattaagcagcatttggacatattttggcgatttgtaaaacgggcatgaccttggcttgctcttactcatcgatggaccgcttgcctgattgttccttgtgctggatgacagactactagcctgaaatggggttacctgtacaagattagtgcagcaaacttggttatttttcagccgcataaaataatatcattcaaacaaaagtcaaaagaacatgttcaactagatataattttaatgtgcgtacaaacaagtaacgggctagcgatcaacccatgcacatggaaattggaggcaccactgatagattagtgaaatagaaaatgctaattcttgactgctactgacatagttagtgtgaggttagcatgagggaattgtctaatgataagatatcgaacctttctcttttgctcattgcagcttacaacattctttggctggacattccttcctccagcaggatggcttccatttcttgacttctgcatcatttcagtctgctgcccacattataaggtagtggtgagaacagtagaaactggtaaaacactaaacagtaaaagctatgtgctttcatcccactaatcatattaaccatcatgggtaccatttctaccttgaccacaacattattcccatttgaaatctttggtgccttcgcagttttgtacggaagaatgccaacggagctacttctgcacaaaagaacaatacagtttagatcatatatttttacttacaacacatcaagaccactataacaagatagagatatagaccttgcacttgagggtgcagatgtgcgtgcgtatcctctgttcagcttattttcatcccatgttgacggtgtgctaagctgtttcctgaccatcagatcaaacaagtacaggagtttcaacaacattcttccaggacttccactgtatatgttgaacacaaaaaagaattaaataccttttattctgcggtctgttgtttacagagctaacacctgctgatcttttcaacgagacctgccaaatatagttaatctattacaaatgtttaatttgcactgtaaatattgagcttataaatttgttagcttcctgatactttgaaaaggtgaatgttatcatcaatacatagaagcaaatgatcgaagttgtatttgttaatagagcaccgtaacagtttggacagacaattcaaaatcctaaatctggtaaaaaaaacaaaaatatacatgtgttcgaaggaaaaattaagacttaatttggagggaaaacctacctgagtagtatgtaaggtacttgccctttgagatgaattgggcatcaccgagtgtttagggtgactagtaacaaacttctgagtagtactattgctgagagcaacatgagagacatgtgatcctttgttgacagctgcacgaggaagggaaactgcaccatgtggttctctaagagatcgacgagaagcttgttgtgctgatttagaagacgcatgaactctatcagcattctgacccaatgcagatctggaagatgtcgcaactctatcaccattttgatatgtagaagatctacatgatgtcatagaagatctagaagatgtcacagctctttcagcatgctgatgaaaaactgatctagaagatgctgttgctttatcagcattcatcctatcagatagagcacgcaatttcatctcgactcttttgtggaatggatccttcaactctaaagagttcctgttctctgaatttcttattgaatcaatccttgggatgtggataacagaagttgatggttcctgagaagatgcaaacaagaacaggtaaaggtgaaatcagattccaaagttaagtttgaagtaacatcattaaatcaatcaacatacaggttaaatctatgctataataattttcttctgtacttcttgaagcggttttgctcattcacacatttgatttgaggttgtacggaacaaagcatattaagtttggaaggcaatgtatttgaagtaagaagagaagacaaactaaaatatccatgaacactatcagtatcttcgatgcacgaaaaattctaatctacagaagtttttttttaaccttgtgatgaagtttgtttacttctattttgattctttagatttcaaagcatctatgacagaagcaactagaaaagcagtactgttctaatatatcttgtcagtaattctcccataatggacatatagctccatcattgtgaagtattattcaattaccttggaactctttgttggcatactactgattagagcattcttccttggttcctgcctctcaagatcaattttcagatgttcccgttgcagacttgctattggcaaggcaatccttgacacggcaacattttctccattatcatttgacacaatatgctttggtgcaagaacctttctctccaaaggttcatggttgagtacatctctggtatttgtgtgtgtggcacatggaaaatctccttcagcgtgatgcatttgatcagagacaggaccctccagctgaatattttgcgatcctgttatctgagaaaacaaaggattaaatgtcaagtaccctagcccatgagggtcttggcatttcttttctcctgatgagctcactccagtggaaggttcaaaactagagcttggagcgctagccactggatcttcagaactaactgcaggtaatttatgttcatggatgttatggccattagcatcatagtgatcagtcccctcttccgatgtggcttcagtctggttgacctcctcctgagccttcaaaagcctggccctcttgtaatattcttcaaagaatgccttcttttgtgcaaccaaaccaggcattgtgagattgcttagctcctcttgacgtctgttatggtcgaataccgaccttttctcccatgacaaggactctgcagcaaacctaccgaatgataccgagccatgatcaagtaccatttgctgaactgaagcatcctgaacaccaacaagatcacgcgtaacgaaaaatcaggatttcgtaaacctttttaccataacagcagtacagcacacaacaagaaaccactatcgagcattgtgaaaacaagaaaccacaaaaagttatcaaaccatgtcattaagctctcatctgaaatgtaagacagtaacttattcgggagctatgcaaaattggtttttcatttggtaattctagtgagcaattggaggtgagtagaacatactgtctgtgcgtggtggtcgttgtaaggcacatccgagtatgaccacccactgcagaatctctgcccaacctctgcagccatttcttcccttcttgtttatcacctggccagcctcagcagaagaagaatccactgataaactatactcaacgctgctgcctctccaatatatctgcagagttagataaaccagaaacatgagcagaactcacaagattcgtggttgtgggtaagcaaacagaaacctataatccacaagagcaacatttgacaaaaatgcagcagcggaatctaacattatactgtatattatgtctgtctacatgaaaccaatccaagaacacaaccgatgtcacaggccattcgagataacgaagcccattgtttttcttctccgcaattccgcaaacacgtagaaaccaaaaccaaatacaaatggagatcttttgcaataaatctggaaacagcaacctaattcggaaaccagcaacaacctaattcagaaccagcaaagaatgttcagatcgagctcccatcaaaccctctcacatagcaaaccgagcaagaacacgaccagacacaagtaaacaaacgaagaaaacgatgaactctcgcaagcaaaacagtatccgcgcgcacctcgcgacgaacattcgcgaaaccaagccatcaacccccccccccaccccgctcgatccctgcacaaacaagaacccaagaaactcccccaatgcagcagggagcaaagctaaccacagctagagctagccaagaacacagcgcgcgggcgcgagcgtgcacggccacaccaccaggcagaaaccaatcaccaatctaaccccgcaaaaaccccacccgctgtaccctcgtccggcatcgcaccaaacgaaaaccatcaagaatcggaggagtactaagcagggacaaatcaagaagaagcggaagcgtactaagcacggatcgatcgatcgacgcggaggcctcaccaacctgctcgaggacgaacccgatcggagcggaggaggaggaggaggagttagtgcggcggcgttggcgaatcgagagagctccaacggccgggagaggggagagcagtgaatgggagcgcgagccgcgaggggaagagagagagataaaaatgaaataaaaaataaaaaaaaggaataaatttggtgtgaatcgaaaggaaacggtaacgttcgaattaaagggcgcctcccgtttgacacctgtcctcctattcctgcctcgtggcccgtgggcttcttcccagccttcttgggctctctgtttacgaatttaaaaactcgtttggattttagaagttgtttctttctctcttttctgtataactcaaggactgcttcgctttgtgtcaggcatgtgtgcacgggcgagcgcgcctgcgaggttggttttcgagttgggttgtcgtgtttgcgtgttccgattgtgggtttggagtttagatttgaaattcggtggacggaagcaatttacaggatggcttgtttcactcatgagccttgatataaaatatttagtaaatttcataaaactataggtactttagccaaaatattataaaattatagatttaagaataaaattatcacaaaactatatcgtaaactatatatttttaattaataataaaattatcacaaaactacagattttagggttcaaataattttatgtttttgagatgccaatgtccaagttttgtgattaaattgatgttaaacatgtagtttttgataactttgttattaaatttgtatttttgtaatattacaccttaaatctgtaattttgtgataattttatcgttaaatttgtagtttttgtgatacatcatttaaagttttgtgaaatttactctaaaaatatcgatgtagaaacattacagaaggaactatgtgtgcacaacaacttttgatataaatacttctggtataaaaacatttcacatggaccatcgatgtaaaaactttacacgtgtacaaatgcatttggaaatagataaaaaaaaagaaaaagaaaagacacaacacctgtttaggccgtgaggcctatgttgcgcggccttcttaaattcatcccacacgtgcggcgcatagcgtgtttgaagaaatctcccaactcctcccttaaccaaattccttcctaaccacttagttaggctaaaaataaaaggaaggcccgacgagaaaatggagttggaaaaataatacaaataagattttgaatagtatctaatcaatctgtgataggaaggcaattaaaccataaacttatccggcattgaatatggacttatctctatgttttccctatttttgccgtttgggaacattgggccaataatttcagtcatatcttcttatttgtagtagtaagcagagagaaaataaaaccatctattttttccaaatctgtctttgaatccccttaagtaaagataaggtagggagtctttgtatatgcagtgaatatgaaaatggatgcaagtttcaaagtatggtattaaaaagctaatgttacaaattatctgatctttttagcgaagaagttgatggttgtgttcttttgaacaatttcccaacttctatatctcgtttttcacacgtacgcttctcaaactattaaacggtacgttttcttttcaaaaacaatatatagaaaagttacttttaaaaatcatattaatttatttttaaagttttttaaccaatacttcattaattatgcgtcgattgatcgttccgttttacgtgtgaaaccttaggtgttgaccaagcccatctataataggctcagatttatacgtattgagaacttctatttttggtactgagtataggtgatctttatcggtcgtattttactatcattagattttcatgagttttattaccagtagaagaaactatcagtagttaagtggcaacgtaaatagatatgatcaatattaaattaagaaaaaggtattaaattaagaaaaaggatattgattgattctcctagctgtaaagagcatcgtaaaacacctacattttgcttgatattgtatatggcatactatttaccactataatccttgctgtcatgtttctgtatcgtttttaaagttaactcaacccccggttaggttttttgtttttagaaccgattaggtttaggtcatacactttgacttaacacggttgtttctatttacgactaattattcatttagtggtagacgatgtatccattaacagtaagatgtatgtggtgatttcttaaatatgccgatccagtatttcgatgatgctcataaaaatagagtatgttttttttttgcattcgtaggaatgagtccgcgcatgctgtgagggcctgcgtttgtacagtgtttttttttaaaaaaagtaatccgcacatataccatatacctcccagttttaaatgtaataattcaagcaaagtccatccaacattatatttacccgtccaaatccaatccattttcatccttttttaggtggtgccatggtactttacttggttgttttctactaacgtatgccatgttgttgtctacttttataatgtcaatcctatttcgttgttaaacaacactacctctgttcccgaatagggcaaaggatacgcaaacaaaaagaacaatgtaaaatggtgcaaactataaaaatgacgtattttcacaaattatttgggtcttctctcctgagagcggaaggccgcagcggcagggtacccaaagccatcgaaatgttcccttatttggaccgttttttctgcgaagaacttatttggacaaatatgaccaaacactgttccgatatgtggattgagatcaacgaggactaaaaattaatcagcacaaaagaaaatagttcaatggatgataaaaataaaaaataaacagtagctcatgacccaaccttttattccctccatgtttcgattacaagttcaaaagtagcttctaatgatccaattaaaaaaatattattttacataggccatggttgaaataactaaaaatttctcatggttttccaaatgttccaaacaggccctttcatttctcctcatttttcaataccaacttatgttcttatcaaaattgcatgtccgtacaccaagtctgaattacttttacaaccacaatatcaatatgaattaccccctaaccacaaaatcaaatatccatcacccctaactatggaactggacaaatacccccctcccccaaagctcaatctgtagtggttttggtcttacgtggtagtccagtcaataatttttttattaaaaaaatcgatggatcctaataatttctcaccctctctatctctatattctatctcattctccaatccctcctctctctctcgtccctcctctcaccagttcacctccatcactcatcggcaccgaggagggcgatggagagggagccaagcacaatggcgggtgggggcggcggtcgctccggggataattattcatgctttttttttcatatatgaactcaatcaagatcaatggcggagtttgatactaatcgaattatgcaagtatgcataggccatccgatatcaacttaatcaatatagtaacatctactacctccatctcaaaatgtttgacgccgttgacttttttaaaaatgtttgaccgttcgtcttattcaaaaaatttaagtaattgttaattctttttctatcatttgatttattgttaaatatacttttatgtatacatatagttttacaaatatcacaaaagtttttaataaaacgaacggtcaaacatgtttaaaaaagtcaacggtgtcaaacatttagggaaggagggagtatattggttttaatttgcatgttgaaggagcaaaagggggaccatatatatgccccgattaaatatgtcatattatttttaggaaaaaacatgtcatattagtagctttatatgctttcatcaaactaattaaccaccaaaataattaaaaacgagaattagacgcatataatagtactacgagctggttgattaaccagccgtctaattaagcttaacataattaactagcatccgtcccagagtgagccgtgggcccagctctgggatgagccgtcggccccgtcgctgccatctgggccccacttcggtgggtccagcagcatggcctccgccatctcggcccacagcctcggcgactccatctcgtcgaactcgccgtcgccgccgcccagctccagccgccgcggcgccgcggaggcggcggcggacacaagcgccggctcgcggcgcacccgctcggccgcctcggcggcggcggcgcggatgtcgacggggtcggtggtggccggctgggggagccagccgacggagcccgggaagttgagctgcgcgccgtccctcccgcgcagccgcagcgccgcgacgtcgtgcgccaccgccgccatctccgccgagtcgaagctccccagccagatgcggaccttggtcccgggctgcctgatctccgacacccacttcccccacttccgccgcctcacccccctgtactgcggcccgccgccgccgcccgccgccatggccggcgccgccgcttgctgctgctgcggctgctgctccatgaccgatcgaccgatcaagctagctagctagcagcgtagaagcatggtgcaatcaatgcggattaatttcggagatgatcgatcttggtgtgtggtttatataggcaatgggtggagagaggttgctgtgcatggaagtgacagatgaccatttagccaatcagcaatggagataatgatgataaaacagacgtgattaaggtatacattgtactactcctactagttaagtactatgagtcaaatgactgatcgatcgatctctgattatttggctgtttgtcactagcaaaatgatgctgtagtagaagcaaaactgactagctgagacgatttgacactacattgctaatataattaagatgagaagtgattgatgatcactcgtcacacgtggtgacgtaattggtttatgattggggtccatggaaggcagcaaagctatacggaaaagagtttgattgccaagaagaagcagtggtggagatagtgatgcatgcatcgtgaagcagctcgggttggttctgtgtgtggttaaattacactactagaaaaatcatttttcccgacgtaggggtctcattttcgcaggcggatataacccttagagccaaatgaccgcctacaaaaatataaatcggggtgaatgtgctagtccgcctgcgaaaatcgcaggcggacctgcgccacttaagaggtccgcctgcgaaaatagacttgactataaatagactttggatagacttagattttttctaagtctcaaaacgcacccctccctctcacatctcctcccctcccctctcctcccctcggccggtgtagacccctgattttggaaatcggaaatcttctgtgtttatccgtaccaatccctggatcagtagttggtacacgcatacatagttggatcacaacatatcacgaatgaatttagactacaagagttaaatacttacattagggccaggtaggccaacaactatcagagaacaacagcggaagacaaaataatataagggcccggttaacacgccacaggcagtcgactggggaacgagacctagaacaagaccgcactccgatcatcttgtgggatacgcaagtgtaccaacaagggcttctcttcaacactctcctaaaagatatataaatagcaagggtgagtaccaaccgtactcagcaagccaccacaacaacaatgcatatgatagagggtatttcaatgaatggcttcaggttcttttgcataaagctaattttacaattcttttcacaagcctaaaacctagcatcgactgatcaaattttagtaccagtgttcactttaaacaacgacggttctgtccaccatccattgtgatcccaaggatagcttcccgccattgaatcgtcatggttttctgaggacgcccacattcccgcctctcaggaagtggctccatcagcataaaaatcatcatgcaatatcccatcccacacaagttaaagaatttagagtctagccaagtgtaatacatgtcccggtgctcaataaccgcgagcatggctattcgaatagatttggtttactcacactgcagtggatgtacactttacccgcactccgcgactgcccaacacatgagcctcgtcccaacacatgagacgcgtcacggcaaagcttttcgataacctcgcattggcagtacccgctccatgaacttaaatcctcatgcactctaggcgtccatgtttctagcagtgagaggagttctggcgctcccgggaaagagaagtctcacacgcatattaaattatggttcaagttaagttctctctctcacacactcatggcagtcctaccaatggcgacaccgatgtagggcacgcctctcggccctacctcaacggctgtcccaccgtagcgcacctgcctcactcaggggtgaaccatctatgcagggatactgcctctgctcggctatctaatccgctaggtctatacccattcgagaagtacggttgtacgggggtcgtttcatgcttaacttcatggctcggtccttaattgaccggggacggtactagccttttccagataccacccaaatcctccgtccgccccagtcgaaaacagttgtttaattttatttttcctttcacaaatcatgtcatcaacatcatggcaatgtggcgctcatgtctccacatgccgcatctcaattaccttcccaaaggtaattgcccaagcatatagcatttgataaatatgagtatgcataattctagaatagcatttctaagcaattgtcatagttgactagggactcatacgtaaacatggttacaaagatttaagggtaaacaataatcaaggcatggcataatcacaagtgggatgttcatcattgcatgcaattttatttgtaaacaaaacaatttcgcaattgggatcaacatgttcaaggaatagtgatgacttgccttgctcaggataatccttattattgatataatcttgatcaaccttcacctcctggaagttgcagacgttgcctcacgactaaccgatacacagggtctataatacgcgagaaaaaccaatattcaaacaacaatcaaatatgcgcaacaaaatgtactattcgtgtttgctaatggatcccaatcatgctaaggctaaagtttcttaatctttctattgtcatcgtggcctatttaggagttaacctacatagcatttatgggatacatatatatttggctaatcagtggtgtagtctatcaagtggctatggaaggattatggctaagcatgcatctatctacataggacggttatttactagaggttctgttgttagatggatttaggatcaatcaaatagttatagtgaatcatttgtattattattttattgatggaagctttactttaattatgaacatattttacttgtcacaataaattataaaaggttaataattatccatgctttgtatgttagagttgttcaggttaatcatattatgggtacagattatcccatcacataattttataatgaataatcctaatttacagttgaactataattataattatatgaggtcaagatttataactagtatttatctaatatacatgtttgtcatactctccctcttaacttaatttatgcaacacgcaaattaatactataccgtaccactataatgggatgtatagtatatgtgtaagcaacaatatcttattattggatcatatatttgagtagttgctttttactgtaagctatacaatacatgttaaagataattatgctactgtacaatatccatttttattcattggcacactatttaggttaactattatctaatcatttgatattaattaatttataattataaatatattttgttaaatagtgaattatatatcattggaaagcttatgaatttagatgaatttaggttcaagtttcacttaaatccgagtaaaagtcgaatgcgaaagtcgattcctttttattaactttactatctacgaactacggcaaacccaatttcgatttaaactattttgcgggtataaatattttgttgtcataagtttttaatttactcatcccgagcattatatccatataacaggttagaaatttctattacgagctaaatatcggacgaaatcttagaaatattatacaatttaatttagtctatgactaaacgattaaatataatacacggctaagattcctagtaattgaatccgaatttctaccatgaaccgatgacttacagagattaccaaaaataatctataataatctataagaattcatctaattgtttggttattaattatatctaaattactaccaattttaatctaatctgatcaagaaacatatatttataattaactcggaatttcgatcgaaataccattacgctcgaggaatttccaaaaataatctattattaaccccgaccatttttatttcctaaatcctcctaatttctcccccaatttcccttctattttctcctttccttctttttctctcttttctctccctctctttcttttcttttcttttctcttttcccttttcctttctttttctttctctccctttttcctttcttctctctttctctctctgtcggcctctcttttcctcttcctttctttctctcctctctcccggctctatctccctctctcggctctctcccacccgagcggcggcggcgatggacgcgagggagaaggagggcggctcaccggcggcggcagcggcgacgacggcggcggcgacggtggcgcacggcggcgcaggagcggcggcacggcggcacgggaacggcggcgcaggaacggcggcgcggcggcacgggaacggcaacgcggcagcacgggaacggcggcgcggcagcacgagaacggcggcgcagtggagaggggagaggggagaggaagggtgagatggggtgggggagaatggagagagggggggtatttgtagagaggggaggagcggcggggctcggggcggcttggtgtgacggcgatggcgacgcgacgatgacgcggcgcggcagcggcgcgggacgcgaggtggcgacgcgatgggcgagcggcgcgcgggtcgcggggcgcgaggcgacgggacggggcggcagcggcgacacgacgggcgcgcggcgatgggatgggcgggcggcagcggcgcggggcgcaaggtgcgatggcgacggacgagcggcgacgagacggtgcgcggcgcgatgggacggcgatgcggcggcgacgggcgacattggcgcgagacgacggcgacccgcggcgatggcgacagcgtggcagcggcggcgcgaggcgcgaggcagcggcacggggctcgaggcggcggcacggggcgcgaggccgacggcgacgatggcgacggcggcgcggcgggcgagcggcgcaaggtggcgacgcgcggctcgggacggctagggcagaggtgggagagaaggggaaaggttagggaccaaatcgaacaccttgcgggcaatgaatagtgcactttcctattattcccgattttaggttattttcaatataaatttgatttcataatttctaaatcttgtataaatgaagtttatcccatatttgtgttatcctaactaaaattctccttaatttgatatcactcatattttgtttatataatttatttgagttttaattagggtaaattcttattctatcgcaattaaatttaattgatccaaatatggtcgcgataatattttatttattactatccatacctaatcttttatttttagtttatatttattttaccaatttgtttttaaggtttattaaagattctataattttctaatgagaccgttattaacataatagcacattagctcaatttatctatatgttagtttattttatatggaggggtttaatatatcaaatttcaatccctaaatgcaattaggaacttggtgcaaaatcgatctacatatcgaattaaatactcccgtaattctattatatatacagagagctcagttcatttgaatgatcatcatttcatgtgtactcgtattatggcacccacctatattattcaaatattttaatatttgataaaataggttaataataacttttattttatttgattttaatatcttgcacataattattcgtaggattaaatatattctcataaatcatatctattgcttaaatgtagttcttttctttaccttcttggtgatcatttacggtttggcaagcaataggaatcataaccaccagcatgatgcaaaagttttaaaaagtttgaaattttagtgatttttattgttgggaattttcaggatgttacagccggcctctcccacggtggctacagcgcggggcggcgcggaaggcggcaggatagcgcgcggcgtccggcggcggcggcgatggcgtggggccgcggcggcggctcccctcccccctccctcccagatttggccggaggagggaggggggaggccggcggcggcggcggcgacggcgcggggccgcggcgacgacgacgcgcacgcaggggccgcggcggcggttcccctccctcctccctcccagatctggctggaggagggaaggggaggccgccgacggcagctatggcgcggggcggtggcggcgacggcgacgacgtgcgcgcgggggccgcggcggcagctcccctcccctctccctcccagatctggccggaggagggaggggggaggccgccggcggcggcgacgacaacggcgcggggcggcggcggcggcgacgacgacgacggcgcggggcgacggcgacaacgacgcccggcgcggctcccctcccctcccctcctgcccggcgtgccgacgccggaggagggcggcggcggcgaccgccacccgtgattttattttgtttttttaatgtattttcgcaagcgggctgttgccccaactatgaaaatggataattttcgcagtcgttgacctacagacggtccaaccctccgcctgcaaaaattacttttggccgtctgtaaagatactttttcttgtagtgttactcgcttccttctagtctagctcatctactaagagaatatatatgcacagttatttggttgtttgttacctgtacgagagatacaaatcaaaagtgaatttgtttggttggttgtacaaacagtaggtacgagggcttttttttttctctacggtgagattaccaattacaactcattgaagcaaattcctactagtatttaaagtttaggcaaacctgacttttttctttgtcattttttttctagtaaaacaattcattaattgaactaatatcgtatacagtaaataaatattgtgtttttattagtatattagtggctaattaccgggggagaaaggaaagagaaagaaaacgaaaaaaaattcgattcctcaccccctcgcactcttcatcgccgagcacaaccacttgtctctagccaccagctccgccgctcctctagttgcactgctcgtgctctctcgtcagagctgctagatccagcaaccacgggctcaaggttgtcggatctggtggcttcaagcccatagccaccggatccgacggtccaacgggttgtgagggggttcatcgacgagctagagtttggtgaggatgacggggacgattgcggccaccggcgagcaaggaaaactacaacaatgacagaagacgatgatgtcgagctcgatcactccaacttagttgcacatcagatctagcgtcgatgagctcggctactccaactggtcaccatcctggatttgaaggcggtgagctcgtcagcaaaaaatctaacggcagcaaacttgcggttctagttgtcactgctgaagaaggggaggagacggtagccgatcttcgtcaagcttttctctcctttcgtcgtgccgctaatgagcagaggggaaaccctagtttaggtcttgtgggggagaaattaggaggttgggcaatgacccatcgcccgcccttgcatgcactgctgcctagtggagcgcactgcatgcgttggacctagccaagatgcgaagcttgaatcgagcttttcccctcttcccctcggcatagttgggggtctgtttttgcacgggcatggctaggctgggaaagccacccaagcaaccaaataaggagaaaatgtattcatagatgccggccaagccggccggatacaagcaaccatatatatatatatatatatatatataacttaattagctttaacgagtcgtgactggttcttatacgggaatcccattacctctaatccctgcccttcttcccttcttcctaggaattaactaaataaggtctaatgggatgagcgattctgataaatactactacctcttatcattgatatttgacaccacgtttttttttttttgaaaactaacatcaccattattattatagatcaaacacagattagagaaaataagtcccccaatacatcgccatacaggacagaacttgaagaacaagaaatgttttacggtgtttgcgaggtacttagaggtatttggaggtggaacaacgcactactacataaagtgtttttgcatacgggcggaatcgatcttcacatgcggttggccggcccgcatgcgcgaaatggtctgcaaagatcaccatttgcgcatgcggccgtcgcagccgcatgtgaagatgtcacttaagacggccgcatgcgaaaatagatcttcgcatgcggtccatataagaagccgcatgcaaagatatattttctcatgcggtcgacctaagaagaccgcatgcgaagatctattttcgcatgcgggcgtcttaagtagaccgcatgcgaaattcaatttccgaatagctaaaataatatttattctagcattttggtgattcgtaattaatattaaattattgagggatttattatcgtatttcggagtagtaagcatataagataagacaagtgccgcagtaacaaacatgtaatacataaccattaattcaatcgtaatttacatacaaatatataatagcaagtggcacagttttttcatcatgttattgcatatgtataagtagtgtacatgttattgcatatgttctttttcccactctctgagaggtttaaatttgtcgtctattgcgagttcactctggttgtcgtagaagagacctcttgcgttgcagacatcgcgacggatgaatcggcagaggtcagcggccacgttcaagatagtagtgtcgttgaatcgttgtgcaatatatgggatttcggggatctgcacacagaaaggaaaataaaatggtactcagtgagaagtgtgtgcgagatgggtttctttgtagagaagagttcgatgacctactcggttactggttgttttgtacctcccatttactctgagcatctcgcacacgtaataaccacacaagttggttcctggtggttgtttgtagcactgcgatataattatggggatcgatctcagtagatatatttagtatatatgtactgttcgataattagttgtattggtataaatctcaatttaacaaaaatcccaattatacataaatcccaatataacataagtctcaatttaaacataagtcacaatttaacataggtgccaatttaacaaaagtcccaattatacataaatctcaatttaacgaaagtcccaattatacataaatcccaatttaacataagtcccaatttaaacataaatctccatttaacaatccacaattaaaccttctcaaaattaaacaatccacaattgcacatatcacaatccacgatgcacaattaaacaatccacaatccacaattgcacatttcacatttctttttttaaaagtaaatgttaccgagcgacggcggggacgacctggcggcggcgatggcaacggcgagggggggagaggtccgtgcggcggcgacggcgacggcgaggggggagaggtcctggcagtggcgtcggcgacggcgaggggcggggcgacttcggggaggagccggcggtagcggggacgacttggcggcggggacgacctggtggcggcgatggcaacggcgaggggggagagttccgtgcggcggcgacggcgacctggcggcggcgacggcgacggcgaggggggagaggtcctggcggcggcaacggcaacggcgaggggggagaggtcctagcggcggcggcggcgacggcgtggggcggagcgactttggggaggagccggcggtggcggggacgacggcgacggcgacttgggaaattttggcagcctggcggctagggtttcgcgggagccgggacttagaaaattttggctccccgcgctccctatatataggcgcagatcatcgtatgcgggcggcttaagggaccgcatggaaaaaatatctttccatgcggtcgacataagccggccgcatgcgaaaaagatctttccatgcgggctgttaagccggccgcatgcgaaaaagatctttccgtgtgggctgttaagccagccgcatgcgaaaaagatatttccgtgtgggctgttaagccggccgcatgcgaaaaagatctttccatgcgggctgttaagccagccgcatgcgaaaaagatatttccgtgcgggccataaagccggccgcataggaaaaagatctttccatccggctggcttaagtcgtccgcatagaaagatctttttaccaaaaaaactcatattttttttctctaagtaaactgtccatatatatttttttcccaatatttcgccacaattatacattccaaatgtttttggcactaagaaaactcatgaaaattgctcaaaactcgtgatcaaatgttacatgctaatgattacaacataagggggacctaaattcatgcacgtacatttggaatacaatgagaactaaaggttacgaaataactatgacttaataaccttggcaacaccatctgctcgaacgtacgacatatttgcttcatcgattgttctctcaaccttcttaattcgcataggaagatcagtaaacaatgatacatcgtcgaattggttgtaatcattggggtcttcgatgttgtcgatgccgacgatctgttgctttccggatatgacaatagtttttctttcatcggatagtgagtagaatgtactttcgtttctgacatatctatgttggaagattatacattgtgagaaggactggccatgtgctgtgcgagctgcttaagtcaccaaacgggttcattccatcagtgctcaacgcaaaccttacattcctaggatccttagcaaattctgggtgttttgcatcaaatgtcttccactggcgagcgtcggcgggatgtcgaatcataccatctattttccggctctcttgatgccatctcatcaactcagcatcagtcgggtttgagtacagacgcttcaggcggtccttaattggtaggtaccacatcaccattgaaggaatcttcccgcgcttacccttatcagaatctggatcggtacactctgaatctacgggcccattccccgttttataccgacttgtgccacacgttgggcaacattccaattccgcatattctttacggtataatatgcagtgattcttacaagcatgaatcttttctacaccaagagataaaggacatatgagtttcttcgcttcatacgtgttcgatggtacaaagttaggcttaggaagcaaaacacgcaacaaactcatcagatcattaaaacttgtgtccgaccatccatgtttagccttcaatctcagaagttcaagcactgaacgcaagactgtgaaatccttatcacatcccttcgtttcatcgtaaagaagatccttcgatgccttctctaatgcctgccaattctccaatcctcgtgacctacccgctagcacatctggttcaacatggcgtagcatatcttctaaatcaaaaccaccatcgaaatcatcactatcggtggaaacatcgacaaccattctttcacgcgacatgtcttcgattataaaattctctgcctcattcatctcgaaacttaactcttcatcgtcatcttccggattggcgaattccccgtgataggtccaaaccttgtagttggcggtgaatccgtactccattatgtgacccaatatttcaccaggatctaccaacaatttctgattcttgcaatgacggcacggacaaaagatctttgtcatattctccctcaaagcatgcgccttagcctgatcaataaatttagatgcttccttaataaatatcggctgcgttctccgcatctcatacatccatgacgaccgatccatctaattatataaaggcaaaaagttacagataaaaaaatagaccgcaggtatttcatacaaaagtttaaatgcatttgtctccccaaaaaaatacaacaatacatgtaactagtatgtacaattgattacatgcaaaatttgcccatcaaaacatatattttgaagctagattttgcaaaaaatagttagaacaaacattgtcaaaatattaaaaaaactccactttccaccaacgaaatataacaaaaatggagccaaatgaagcaggatagagagttcttcacctttcgtatagagttcaagtaaaaatttcgagttgaaaacctccccccctaattggtgcttgctttaggagagagaaagcttcgttttcaaatggtcaagctcgggcctggaggagcatatatggccgatcatcgcatgcggtcccttaagccagccgcatgcgaaaatagacctattatcgcatgcggctgtcttaagcagccgcatgcgataatggatcttcgcatgcggctaatcaacccgcccccaggggggcggtttttgcaggcgccgccacaagcggcccgcatggaacctaccgaccccctcgtacagaaaaacgatttttgtagtagtgacgtgaaccattgatcaagagaggggcaaggtacggatcaaaaaacttgtaacataatggcagtggagtaattaacatgtaaaacataggcattatacgttaatagaatactaacatccatctgtcagtattcagatcggtacgccatcagaaaaaagagtaaatcacggaaatcaatccgatcgatctgtaacatatcgcatctctattcttttttcccttggcttcgttcttcttctagggtttggatgtttcaccggaaggaaacagagggtaaagtgttggcatggttgagggttgaagaggagactagatcgcctggtcgacgccaacctagcgcatctgtaagttatcctatccttatttacacagttgattagttatttatgtagttcataaattccttatataagggattggaatttttgccaatttgtggtatagtaaacgagatcttcttcaatggtgttcttctagtgttttaacgggtgcacccacgaggagacatggtcgaggaagaagctctagcatggttgagcgtttgaacataacgtaaatctagagaaatctacgcaaaagagaacataaaagaacaccgcggtaaatgacttaactcgaatacaacgtaaatcttcgagaaaccacgcaaaagagacgttgataccatgtacatgttaatgcgtacggttgtacctatgcggtacctattataatttgaaggacaattctaccattttcactctactaacaaaattatgtttttacccttagtacctaaatacctgtatcaatacttaaatacttttaacatggtacctgtgattgaggagcgttggatctttaccctttttggaaagcaaacactgtacataaaatcatccctgtggaaggtgaaggtactgaagtcaacgagctattcttcaaaagaaagcatacagtagtaatatttgacaaccggatcggagggagtatctggtatcactgcgcttctactaccgaagcagtaatttttatgcgtcaatagttaagaaacttaattttgcatgtaactcgatcaattaatatatataaattgtgtgatctgatagatattactgataatttagggtaacaacaacttaattagggccgatcgagtaggggaaaaaatcagggagaggaacgtttgcatataggtccccgtattggcgtattacaacacgacacgcgtccacttgaagaccgtacaccggcggaccatgcatgcatgagaagtccctcgcccaaccatcccctgccgtacaaatgttccatagattttaattttagaaatggacgacaaattgacaacctagttcttagaaaaggaaagggcaaatatattctcccgctttaatatatgattttataagtgtatgctcaagtaacttttttttaagggactacctattaatgtttagatagatttggaagttcatcttacagaacttttaatcaatggatatagttcgttttgaatgaaataaaaaaaaaggaaaaggaagaaacatgtcaaaatcttaaatatagagaaaaagttgttgtaaaatataattttgatgtattataactgagtgcaagtaaactataactgagtgcaagtgctctttaaccaagtataagtactctgttactgagtataactgaaagttggatctactggatcacgaatcttgatacaagattctatgagcaaaaatcgaaagacgggagcccaaaaatttatcgtgagtgaaatagcaaaaccgttttttcaaataagaaataaaccagccaagtgtcaaagacacacgaaatctaagtggttctgatcaagaaatttctttctttttggagggttcttccttgtacaaagacagatgctatgtatatacacatgtactttctctatcttttttggaacagagagagtagacctatttctataagcatctccataaaactagactagtgaacaaacatatcttgagtcctgagattgacgaagtcactacgggcatccaactgagacaatatttagcagtaaatgcgagcacacgagttaagtttacaacttgaatatgagtgaacaagtttctctacagggaacctaaccaatttcacatcaatggcagtcgaaattaagattaatttttgtccttttaagatcgaattctattttagatttcccacgcatttcttccaagtcaaataatggcccagaaggtcggtacgttaaaactatatatatcagctgcatatgactagaatgtagttgagcagtgcagcaatcatatgagtagaatgtagctagttgggcagctagcttgtggctcggagcgatcttgcatgtttgccgacaacgagatgtgatgcgtacactgtgcccagcgtgaaaacggcggacgtggttacctcttgcaacagatgatcagagaaaaatcaacagcaggaggaaggcatcaaggagtgtcgctctctctcgatgcaaattgtaattaactcctatacatctcaacatgaagggaaattataataagtaagctagatcaggatgaataatgtatatggtcaatgtgtcatcgtcgtctctctgaaaatcaacgaatgtcgttgtggatctgatcaagatcaggttggtgatgatgatgatgattagcctgaatgcatgcataatgcacggacttcacaaacaatggcgggctacaagtttcctgcataattgaaggatttaaggcctcagtcaccttcaaccctctatagatcaggcgaggtaagaagagaggagaaaagagggaggtggcaactagagattaccgatgacgataatgggtcggtgcctcaacagtctcttcttattggtgaggatggatttagaagggtggtcggggaggtggaagtgtagtggtagatagaagagacgagcatgtcggtgagggtgctaatagaactacggagatggaggccagtggtacgcggggttggtagcgaggtcaacaacgacaagtgtggttaagaggaagatcagatgacacaagctaccgaagacgaggaaggatcgatggaccgagggcttcacttcgtcggagttggagaggaagaaagtggagggtggggactgaggaggccaatccagcggggctggcatggccgagggaagggaagggggtgcgtgctagggcgccacggagatggcagaactcatgttatggggaagcagaagtggaagggttaaggttactattcctcatgtagatgcacaaatcatggcgcaatcaacaacctaaaaatgaccgaaatttatagcttttttcaaatggctaaggagatacatattcttataatggaaattaattaatcccgtctctatatcaagatgtttccaaccaaccgtgggttacatattagtaattactaatcagtaattcaatactctctcccttttaaattttatatcaaaatatattatcaaaatatattactaatcagtaattactaatcagtaattcaatactctaatcagtaattcaatacctgtcattgtcactctagcattcaaattttatatcaaaatatttatcgttctcatattccaaagcacatttagagatgatctttccttgctaccatatattcatcgatgcaatgatacattaatagagtcacaattctcactggcttacctgctttgaaaaaaaattataatgtatttaatgagagaaaccatctaatctaccacatcttcttagttaatttgagtgagaacggaaggagtgcgtgtatacgtgtgggagctagcactgtacggcaaacccttttgacctttctatctactatatatatgcagttttggagcacgtaagtaaatcaagatcgccggatactgtgtgtcggctggatcatagtacagagcacacggcgctactcatcattgatgattgcattgccttcggatttttgtggccagcagcaacacaccccagtagtgctacgtcgaaacaagatttcggcaatactaaaagagggtggctatcaagctggaaaagtggatgtgtttaaagacaaggaattttatataggttcaggccttcttaatcaagaagtaataccctactcctgtccggggattgatccgccgagtgtattattgatcgtatgatctggagaaaatcgtgcccctaaagacacccggacccctccttatataggggaaggggtccgtattacaaaatacagaccatatccctaacggaataagtagttaccgataaaatacaatcgtaatcgactaggatcttgggtatttccttgacatacaagtttagaatttaacccgagtccctctaaagatattctatctatacatggcaccccatacccagtcggcctatacatgccgtgtaggtatggggtatccataatctccacagtagcccctgagacctttacagtcgacgaaatagccttctctcggagcgcaaaatgataatccgagtactccgacttcttctgccctgatctcccgagtaccaaaatcaaagactgtgaaggtctaaaaatagaaaaaatcgggtgcatcgactagatgcacctaattaggtgtagcccccgactatgtgattagttaaaaaactaaacatatagtcaagatgcaaacaacatccaaccgagtggtttgacaaccgaatatcatacagcaaagcatatgcggcgttcaataaaacatccagccgactgcttttagccttaatataccaaaaacggagatatgaagaggcctgagtgaaaaacactctaaagatctataaatccacacatttgataagaatccaagtaaaaactctcaaaaagatccatcaaacgtgatataaatgtgataacataacaagtgatgagtctaaatagcctaggctatgactcacaccagaatcaaaataagcatataacatgccgagtgaatgaatgtattaaaaccagtcatctcaataaaacccaaacaacctttgcagcctaaaaagcctataaaattagtataacacttttctgttgggcacatttttatttgcatcatagtaattccaaagaattatctaactgcgtcaaaaaggattttaacagcattgggctatactgtcgtgagcgagtattgccaaagcaaaacgcctaagtccctaaggatcacaacttagccatgctgatagaaagaaatgggttgaagcactattccgggtctaggcccattaatactcccgataccctaataataccaaaaaccaaacgccgcttcgtcttccccgtcgagactctcaccactttccccattccccgctacagtgcaaaaccgcaccggcggaactagggttcaccgatttgctcaaatctgccttccaaaactccacagaaatcttccgcgcatccaccgcactgatccccatccattcccagccatttccaaagcaaatcgcatcatccaattcacattcatggcagaggagagagaaagcttcaagagccaatgggcgccctccgacgtcaccgaggagagcttgaaggaaatggtagtacatggtgttctttcggcaaaggagatcattggatggcgtccggcgtacggcgaagcatttccgaccccggacacacatgaggttgtggtgttctcccatttctttgacggtgggttctctcttccaacctcaagattcttccgggggattttggatttctatgagattagtttgcatcacctaaacctgaattccatagttcatatcgccaacttcatacatgcttgcgaagcttttttgggcgtcaggccacattttgccctatttcgccgtatcttcttcctcaagccccaaccgaacaagagcaaaccatgtgttgtcggggggggggccggcttccaacttaggggaaccttgagccagaaatatatttccatgcccttcaaaacctcaacaagggctggcatgcaaattggttttatgtacaaaaccccaagcctgcactccccgagtactcctgtcttcctccagtttatcgggatacttggaactcacttccaatgggagaggaagccgctcgggcgcttgccctgatggaccgtatgctgaaactaaaagagcgaggtctgcaaggggaacagatcacccgacattttatcaagagccggctggccccaatcaaagaaagatctcgcacagcttttgaattcgacggcaagcatgaccctaaccgtgaagatcctgaatctcttgaattcaaagttatgaaggagagaatgtataaaatcttctcaaatgcaatcatagtcagctattcacacttgctgccagtggtgccgtacaacgctttcaacccccctccaccggtatttatttaaaatctcagcctttctcaaaagcatgcttttaacatctacaaaattgattgaaaacttgaatcatcatgcccaggaattcgccttgatgaaatcagaccctccaactgctcaacgccgctcaccccgtcggcaaactggtcaagctggcggaggaccaaaaatccggtctgattctcaacccagcaccactcaatcggccaaccaatcagactgccgcaagaggaaattggttctgagcgacgatgaaaatgataactctgaaaaagctggtagcaaggggtgactggaaaaccagcaaggcaagctaacccgaagaagaaaacatccagtcgtcccatgccgaaaatcaggaaatcctccaggtacaaatcatttagccatcttccttgtattgctgcttactcactattgaaatagcactgatagcataatttaaatttgtaggaagccatctgacatagatccttttggaaaagaccctgagccgactgacatggagacgggcccttcaaaagaaaccgggccgaccgccgaagatcgcccgagtgataatcaaccaacaaccgacaacgtagagaccaacgacgagcccccgactggaaatcagtcgaccgaagctggagttggtgctaatcaagagcctccgactggaaatcagtcgggcacagggcaaaataataacatcccggaggtagagacccaggctgatagccctcccaagacgagcgctggcgccaactctggaactaattcccctgttagggtgcaaggtcctgcttgtccccgaccggaaatcataacaggtaagcaaatcctccaaatctattttgatccgacagactttcttcaattgtttcaccattatgcatgaatgcctaaggcccgatgatcggcgacgaagatgaggtcctccggatacaatcagctgaagattctcgcccacccatattagtcaagtggtgggatgacgaaatgcagccacaggggatcgtaataaataagcaataagaggacaaggaagtatgtctgctgaaaaggacactcagccaagctactcgcctcgtaaatgtaagtcttcttatacacagcttcaatcatcctgtctgccactttgctcaaatacggataaatttgtgtcacagagaatccatctcaggaatgaggcgaagactgcaactcttgaaaaattagttccccatcttggaacccttgaggccaccagaaaacagctgcacgaagctaaagagctcgccaggaagactgagcattatctgagagaccggatcgccgtgctccaagattccaactttgagctgagcggttcgtcaaaagataaataccgtctttgtctgacttatttatactgctatccatgtgatatcaaccaacaagaagcaatacagtgcaaactgccaagatatccgagctggaaaagcggatccaagctctagagaaagacaaagccgaattggcaaaacaaagggactcggctctgaaagatgtcgaaggtactggtaactaacacttcaaaaaccactctcatcttcatgcctagtcattgatgtaaagttactcatgtagaccgcaagatcaaatcccaggcccaattcgacgtcttagttaataaaatcaagaagcttgaaggagccagagatgaagtcgccaatgccgctacaccactcgtccaggcaatgtttttcaataacaacagtccgagttcacttgatgctatcgagatcttcgacaagctgagagctgctccggatacatattttaaaaacatcaaagaagctaggagtatgggagtaggcctagcgctggcgatgaccaagtccttgtacccgaagattgatattgatgctgttgacggctttgctaacgggacaagtgaagaggctgcccttgaccttattagtgatgcgcaaaaggccgatgacaagatagccgctgatgtggttgagagattccaggacaacgaccttaagtcagctgggtctggtaattctgatgatgaaagaactgagtctaattgatgttgtattttgatgatattgatgatgatgatggaggtacaatttgtacaatactgatgaatttatgctgtgcttgatgatttaaacatagctcctgatttcttaaaagtttttgtcaaaccttattgagcctagaacccgcaaaagtttttaaaaacttccagccttcattgactgagccaaaaaaatcaaagaaggcaatgataaatcaagtaagcaaattgaattgataaaaatcacactccattattattatagtagcccccgactgataactcaagggacaacttgatgttaacagtcaaagaggaaaatacaaaagtaatgcctaagcataaaaatgacgaagatgttcaatattccaagagttgtcgagatgagtaccgtcttcacgcttgagtcagtaagaacctggccgagtgacttcagaaattatgaacggcccttcccacaagggagacaatttgtaccgatcccgtgtagtttgaatttttctcagaaccaggtcgccgactaaaaaagcccgagatcgaacattacgattgtgataacggcgcatcccttgtaagtaccgagccgactgaattaaggttgcttcacgagcttcttccaatcggttgagatcatctactcggtcttctccgtagcgctcctcgctgaagttacgaaatcgcagagattcaaattccacctcacttggcaacatcgcttccgctccatagactaggaaaaatggcgactggcccgtagcccaacggggagtggtgcgcaaggaccaaagtacggatggcagctattctacccacttgccggcatagggatgtagtcggtcaaaaacttgcccttttattcctttaagtaccatgccattggcacgttcgacttgtccattactcatggggtgcgctacggaggcataacaaattttgatgccgaagtcctcacagaaatctttaaatactccacccgtgaattgagtgccgttatcagtaatgatcctgttgggtaccccaaaccggtgcacaatgttggtgaagaaatctctagccttgtctgccgtgattgtgatgaccggtttggcttcaatccacttggaaaatttgtaaacagccacaaagagatgagtataaccactgactgcctttttaaacgggccgaccatgtcgagcccccaaaccgcaaagggccaagataacgggatggtttgcaactcctgagctggtagatgagtttgtcgggcgaaaaattgacaaccctcacatgttcgcacaattttgtcagcgtcggacacgactgtaggccagaaaaaaccttgccggtaagcctttccaacgatggttcgtgcggcagcgtgattgccacagatacctgaatgtatatcctttagcaattgtcttccttcctctaaagaaacacagcgttgcaggattcccgatggacttctcttgtacagctcagtctcatgaatgacataaactctgcagtgcctggagatccgctcggcttcatctttatcttgaggaagttcttgttttgtcaaaaatcttatgaggggctctctccagtcggcttcaatcatgcttacgtcttgagtgtccgcggccttgattgtttctttccttggtacggttggctcgtagatatgttcaacaaacacgtcggaaggggctgcttcccattttgaacaaaaattagccaatctgtcggctacctcattgttgtgtcgaataacatgggtgagctcaagtccatcgaatttgtcttccaacttgcgcacctcctgtcggtaagcggtcatgttatcatcaaggcagggccactctttcataacttgattaataaccaactgagaatctccacgaactatcaaacgccgaattcccaaagagattgcaatccttagtccgcgaagaaacgcctcgtattctgccatgttgtgagacgcagaaaaatgtatccacaatacgtagcacagcctctctccagtcggggagattagaacaactcccgctccagtacctgaaagcctctttgacccgtcaaaatgcatagtccaatactccatcttctctgcaggcgtgtcttcttggcactcggcccactcggcgatgaagtcggctaaagcttgggacttgatcgaagttcgcgacttgaatgatatatccaaagacatcaactctaaggcccactttgcgatccgcccatttgcttcgcgattatgaagtatatccccgagtgggaacgatgtgaccaccgtgaccgagtgtccttggaagtagtgagataatttcctgacggtaattaaaacgccatatagtagcttttgaacctgagggtatcttgtcttggagtcagccaaaacctcgctaacgaagtagattggtcgttggactttttgaacatggccttcttcttcacgctcaacaaccaggactgtgcttacaacctggaaagttgtcgacacgtataacaacagcggctcttgcggatgtggtgaagctaaaactggtggagtagtgagaagttttttgaagtcttcaaaggctttttgtgcttcgggtccccactggaaattgtcaattttctttaacagcttgaaaaaaggcatcccccgctcgccgagtcgtgagacgaaccggctgagcgccgccatgcagccagttaacttttgaacatctttctgggagctcggcggtttcatgttgaggatggcgttgattttctttgggttggcttgtatgcctctatgggataccataaatccaagtagcttccctgacggtactccgaagatgcacttttcagggtttaatttcatcctgaaagcacggatgctcgcaaaggtctcttctagatccataatcaaatcatccttctgcttggtcttgatgactacgtcatccacgtaagcttcaacgttgcggccgatctaagttgaaaaacatctctggatcatgcgttgataagttgctcatgcgttcttcaatccaaaaggcagggtgatgtagcagtaggccccgaagggcgtgatgaatgaagtcttcaagcagtcaaattcctttagtcggatctgatgatattctgagtagcaatccaaaaaactaagtagctcgcagccggccgttgagtcaactacctggtcaatgcaacacaacccaaagggatctttaagacaagacttgttgaggtcggtataatcgacacacatgcgccattgccccgtcttcttccgaactaggactgggttggctagccagtcgggatgaaggacttccttgatgaagcctgttgctaacagcttggtcaattcctccttgatcgcatccttcctatcctgtgcaaaacggcagagtcgttgcttgattgttttagcgtcttccttaacatgtaaagagtgctcaatcacctctataggaataccaggcatatcagatggtttccacgcaaagatatctttattattttgaagaaaggtgatgagcacactttcctatttacaatctaactcagcgcctattacagctgtcttagtaggatcagagggatctagggggatcttcttggttttggcgtcgctttctccgctctttgacatcttggttgcaggcacttctcctttgcttgatatggacgcagccagtcggatttcttctcgggcgagcgtgatctcgcgggtctgggccatctcgcagctttccttgtcgcatgtgacggcttgcttgatgtcactccacagggatatgactcctcgaggaccaggcatcttcatcatcatgtaggtatagtgcaggacagccatgaacttggctaacgccgggcgtccgagtatggcatgatatgctgtctcgaaatcagcgacctcaaaacaaatgttctctgtacggaagttctcccgagtgccgaaagtaaccggaagagtgatctggctgagtggtgtagcagatagccccgggatgactccgtgatagggcgcgttactcggctttaattccgtccgagggatctgcatgtcgtccagagtcttggcgaaaaggatgttgagtgtactgccaccatcgatgagggatttgcgaagcttgacattgcaaaccactgggtctagtaccagggggtaccgccccgggtggaccacttggtcaggatgatccaagcggtcaaatttaatcgttgtctctgaccaccgaagatattggggcgtgtcgggctgaacagcgttgatctcccgttcggttagtttttgctttctcttggattcataagccaggggtccgccaaagatgtggttgagttccttctggtggtcttgaaaaccagtcggggcatcatcttcatcatcctttttctttgatgtgctttgatctccgtcagaagttttgcgtgtgttcttggcgtattgttctgtaaactgtttgtagacgaagtaatctttggccgcgtgattggaattgggatgatgcggacattgggagttcatgattttgtcaaaagtgttgacatgcgaacgttgtcgggaggatggtgtagtagttgccacaagttcctcaggcttacgcttgcgatccttgtgattggtacttccactcccccctgtagtcggcgtatctttctttggcttccaagtagtgcccgactgcttggacgtggtaatggcatcttcggctttggcatactcattggctttttcaaacatctgcttgaccgtcctgggaggcttgcgcctgaacttgccgactaggtcatcgtggcgaatgcccttggtgaaggcggcgatgatgacgtcttcggtgatgtcggagatcttattgcgttgctcggaaaagcgtcggatgtaatctcgaagggattctctagacttatgaatgatgttgtagagatcaaactgtgtaccagggcgttcaaaggtaccctggaagttggcgatgaagtggtcgcgaagttctgcccatgatctgattgtgccacgaggtaacccgtgaagctaggaccgggcagaatccgctagggccacaggcaaataatacgccatggctttgctgtctcccccggctgtgcgaattgcgagactgtagacggtgagccaagactccgggttagtggtgccgtcatacttcttgattccagtcggcttgaagccagccggccaatccactcaacgcaggtcgcttgtgaaggcagcaactccatccacgtcgtcgtcgtagcgatctggtgaatggtggggagagtagcctcttgccgcgcgacgctggttgatagtatcgcgaagatcgacggggcgcctgcgatgtggggagcgtggtcgttcaactcgacgctccctgtgtcgttcgggaggcgagtggacagatcgctcgtcgtgacccctgctcctacgactggatcccgcgccgacgacgctgaggcttggttggtgatagtcttgagatcgaagagggggaactcggctgccagtcggcgtgcggacgcttgcagagttaaccgggaccgaggcgatgatcatggtcttggtctggttcaagatgttgacgacgtgattggcttgattgagcgcgtcttccttgaggagggtgtcgaggagggtgatcgctgcaaccgcgttctgttgggggtgcggaaaaccgctgttccctcaacgtcttgttgcctgataagttcccgtgctcgtcgctcggcatccaaggcacgttatcgccggtcctcagcctcttttgcagcccgttcgcgttcctgttgctcacgttgtagccgttctcgctcttgtgcttggcgctcctcttccagtcggcatctttcggcttcctgttgtgcgcgtaattcttctgcttcttaggctttacgctgttcttccgtctcgttgtcagccatgaagatgccgaagtagagaggtgtgtagttgtcttcaaagccttcatcgaagtcgtcgaggttgcggtagtcgtagcggtagccgaagtcgtcgtactccacgatctccgttggtcgtgagtcgacgccgggggagctgaggtagccgtccagttgttccgtcgaaaccgtgccgagaggctggagtatgacgccgacttccctggagctaggctgggccggggctgaagccggatcccgcctaggcttgcggggaaaagatgcccttgtggtgaagacagcagccaaatcatcagggagtttcatcagaattggcggataggccccatcgtcttgatcgggtcgtgttgaagtagattggatctcgtccgagtggtttgaagccaactcggtggagatgatcttggggtagacctcggctgagttcggggtatcgaacggggcggagatctggcctcttcccgactagttcgaatccgagtcgaggagagaaatcttgccgaagtcgttggtgatgaagttgaggctgccgaaccggaacgcctgcccgggagggaagacgaagtcgtcgatgccggaaacgaaacccatcgcactagtcggcgaagaacttgacactactcctacctggcgcgccaactgtcgaaacaagatttcggcaatactaaaagggggtggctatcaagctaaaaaagtggatggatttaaagacaaggaattttatacaggttcaggccttcttaatcaagaagtaataccctactcttgtccggggattgatccgccgagtgtattattgatcgtatgatctggagaaaatcgtgcccctaaaagcacccggacccctccttatatagaggaaggggaccgtattacaaaatacagtccatatccctaacggaataagcagttacagataaaatacaatcgtaaccgactaggatctcgggtatttccttgacatacaagtttagaatttaacccgagtccctctaaagatattatatctatacatggcaccccatacccagtcagcctatacatgccgtataggtatggggtatccataatctccacatactagaagaaggccactgcatttgccttgatgcacaggttaatcatctggactactacactatcaatttaaccgtctctcgccatagtactagctagctactccatttttccataagcaaccaaatattaattggattggacacacgaatatactccctgatccgtcacgtaatataaggatttgggtgggtgtgacacatcctgtgtctgtccaaattcattatactaggatatgtcacatccaccaaatcccttagggtgtgtttggataatgggttaggagaggtgggattgggaaatagaaatgaatgggcggatagaataaaatggagtgagaagaatgcatggctaggattgaaacttaccctttgaggggtgggaaattatatcccaaacccattatccaaacatgactttatattatgggatggaggaagtagatatgctagaccttcttctgtgcgcctatagcttattataatcatctactgacttagttctaaaataaataaatctaggatagtaggatagtatgtgacattacctagcacaataaatttaaatgaaaacctatccacattcgttgtactataaataatatcttagattgaattattttgagaaggatgtggagtatacatataaatatgtatatgcccagtagctagcttaggcagggcgagatgaggcaagttaacttaccaaatgcatgcatcgatcccatccatcagcacatgcacatgtaccactgcactgcacggctcgcccgctcgcaggcgacaggtgagtttaatcaacaccaagaatcgaaagagagaatttcatgaagaagtaattcagcgcaagcggccggccaggctagctaggcgtccgtccggccctgcttgagctgtcgtcctttgtgcggttccaatcattagcgctagctagctactccagcttgcagcgacggcgacggcgatggccggtgtactacgtgcggccaccgaggctagcagctgggacgcttgcaatgcacacatgtggacggtggaccagccacagccgcgctagcttgccttcgatccgtacgccgtcgggtcaaatcctggaaaggaagaccactactggaacatctccatctccatcgatctcgatcgagatgtgcaggcgcaggtggggggtggatcgatcgtattcatggatggatcgatgagccgtgggcgaatcgtgggggggatgattcgccgtacgctcgctcgattgaccggatatcgaccgatcgatcgatgggatggatattggatcgacctgacatgcatcatagtatgctgttgtgccgacacctgatgaaggacggcggcaagcaaggaagctgacagtgaaggagtactccgatcactatagtacgcgtcgtgctaaattcaaattgaagaccaatcacgagctgttactgtacccaattaatcacccgtgctaaaatatactacttccggagtaactttacttctctcttgggttgacatattttcagacaagagaatacttagttaattactcatcgattcctccggtaaaaaaacaaaaatgtatgttgcgaactgctcaattttctatgcaaaaatgtatgtctatttacaacgcaaatactccttccaaactcaatctctttccagtttcaaaactagatcaaggttgtcaacatctcgattatcatacgattttacaactttactatcttaatttactatcctaattaagatgcctgattctacgattttacaattttatatatacagtacttatattgtgatcctacatagaacttctcattttgatttaggatcatgaatttaacaacatgttgaagggttagactggaaaacggtattttagaaacatagagtcgaagggttacatcatgattttaacaacatgtcgaaaggaagatatgtatttttatgctggttcaggctcccaagctagataatagccattctaatttatatgtatatatgactcttagggcatctacaatgtgtgcaaaaagtagtccataagcaatacaatatttcattcagctacctatcaacattgtagaactagtccataacaaagaaataacaaaagctacccataaacatatgggctgcccatagagaataaaatatgttatttgtctctacttcctctttcctcctaatactatttgatatctatatacattgtgaaggttataatagttaaagctcgtatatgtgggtcccatctatatagactaattttactatatacattggtgttgcccttagggcaagtcacacccattacaaaagggagcaagttatgctagtctagcctaccaaaactaatctcgatgagaattgatttggcaacttggagtaggtggctagatatagggcttccttgatctcgatgaggttctttctatggcttatgatttgatgtcattccctcttgtatttatacaggcaagtaaccccttttgcaagtagaactaggggagtccaaggaagctatgagcagataagaccttagtatccggatcgaagttcaacatctacaataactgccgctaacatgtgggatcaggtctacctgtcagccactgctactacaagtgtggtattgtagaggatatgtgttcatgtgtaatgctcatgtaagggaatgtatggaaggagtgcagacgtatatgaccttatatataaaactggatataacgccttttgtataaaactgggtatacggtattctcgacagttacgaatacaagtattggagatatattgtatccgtaacattaacacaatcttggctaggattgtgcttttatcccgacggagggtatacgtgtgtagttacacccctataagatttgctttaagattcactcgtcacacatatttctataaataataatattgtattcctctttaactcaataactccctattaaaaaatcaacttacagctggttttggccaaccaaaccaaactgaggcctcctagagaggctgccactagttctccctgacgagatatttaagtatttgccgctctttgatgcgacgtttaacaatctctgtaactatggtgtattagcaaactagaacccacctcacctctgctaactcctaaccattttgctcccttcttgtgcttcccaacccaatccagcatggttgtccgacgcccttattctaaggttgagatggcaccatagttgattcacgccttcaccaccccttgcggtcgctaagtgaagccaacatccttctaaccttgatccactcaatcgaaccctcttcctaccctaaccacaaaccaacctacatttagaattcatccaatcagaagaaacccttgaagtgtctataagtttctaaacaacttatatttagaaaaaaaaactatcagtatgccagggttatgactagtaatatgtatatgatttacaggacatggcccatataattgagcatggttttcttttttttaataatgaaatataatcctggcctttactcaaagagctgcaaccaattattataccaattcaattataatggaatataattgaggagggttgtgtgatgggtggattgatgataaagcgcgtgtttaggcccataaaattgggattggttgggtaaggtggattgaagagaaagtacacgatctcttttaaagtataagagatttactgacacataaattgtttgcgtgcttgaaaaaagagagtaaatttcacaaaactacatatactttgaccaaattatcacaaaacaacatatttaaagtcatatatcatagaactacagatttaacaacaaatttattacgaaactacaggtttaaaacttataacaaaactacatatttaataataaaataatcacaaaactatagattttgaggtttaaatcctttgcattaatattatgcttgagttataaatatccaagttttgtgattaaattgatattaaacttgtagttttgtgatgttttatgatattttaccttaaaaatgtagttttgtgataaaattagtgttaaatctgtcgaaacaaattttcggcaatatgaaaagggggtagcgcacgagacctaaaagtggatagatgcagagacaaaggatttagacaggttcaggccctctcgatgagaggtaataccctactcctgtttggggatttgaatccgccgggtgtatattgatctgacgatcagtttgtgtcatgccccctagagggcctcctgcccaccttatatagggtgggggcaagattataagatagaaaccttaaccaatacggtatcggtttcctaaatttactttacaatattatcaaaccaggactttaggccgttccgtaatatacaaggaaacgtaatacccaagtcatgatctgttacatattctatagatataagttatcccctatagccaatcggataaccatgccgtgtgggtatggagtacccataatctccacagtagcccctgagaccttcacagtcggaaatataatcttctcttgaactagattactccaaagccgagtgcttcaatcatcttcgccatgatctcccgagtacttttaccaaatatgaagactgtggagggctgaaaaataaagtcaggtgcatcgaatagatgtacctaatagatgcaccaactgagtggttttgataattgtagtcaaccaagtgacttaatattaatatataacatatgcggtgtgaatccctgaataacatgatccgagtgatataccgactgctttgtaaaatatgatgcgtgcaacctaaagctgacttcatcattgaaaattcacatagcaaaacagctacaaagaagcttgtatgttgtgaataaagaaattttcaaagtattgggcatacgccatgcgcatactgctttaacagatgtgcttaagtccctaaaagacacatggtttcaccacaaccggaaatatacgacatatgtggtgtaaaatccgagtaaataaactcataaaggatttaccaaccacttggaaaatgaccaaaatatataatcagcctaagccataatattggtcaataaaagtgcacacttacgtggccaaaaagcaacgatattgtatccaatcaattgctttatgaacccaaacaacgccttgacttatataagaaagtcagcggggagctatataaagcattactgtttggcaccttttaagatgcattgtaccaactcctaaaaagttgagtaactgcggtataaaaggattttaaggtattgggcactagatcacgcgcactttggcctaagcaaaaagtgcctaagtccctaaaagaacgtgacaggccacacctaaaaatatgggctgcagacatattaggcctaggccaaaaaatatgccttcgacaccctttaaaggatgacacatgtaacatgctccagagtaataaatctttcgggtgatatagaccaagtgtagctcatatgaatagcttctgatttgagtgattatcctttatgggatactccaaaatagatataacaattgaattcctactggcgcaagtattcggttgataacccttatagggaataataaatagtccagtctttaagcatagaaaatagacccatgatcatcaaattcatgttgcatgtatccggaacaagtccaaattgaaggtatgtccattgattgtagctgacgcagttggcatagagacaagacgaccaatatagagataaaagtggcaaaaatattggtagtagtgaagatagtgataccaatcaaaagtgatgaagttgcatagccgtgaagacgaagaaaccagtcggcaacagtcaggtcagccagcaatgaatatgaaggcgcccagcgataaagttgtgtagccatggcagcgaaataatcagtcggtgacagacgatgcagctggtgaagaagatgaagatgcccattagtggcgacataataagccatccatgaaggcgaggataccggtcggtggtgacgaaagcaagccgacggtgaagatgtagacacgcatcaaaggcgatgacgaaatccaccaatcatgaagataaagaaaatagtcggcgacgacaaacgcaaccgacagtaatgatgataagcagcaatcatagatgatcaaatataatgacgaagttgcccatcaaacagcagtagaatagggctatgttgaaaaggcttgacaggatattgatgaagatgacgatgtcggtgatcccgtcaatagcagtgtagcaaccgatgataatgatgaagacgctcatcagcgtttgcaaagtaggtcaaccgtgagggcgaaataacaagtcggcaatgacggaagcaactggaggagaagacgtagtcatccattagcaacggcagagatgtcagggccgatgaggtagaggtgctggtgatgaagtcaatgacaataatccatcaaactgttgagaagatatcgaagctcgaataattttcttgatacgagcgtgtgcataatgaagactgatgcaacgcctcttgatttatgaagatggctgtagaacttggtgctatagctgttgcagatgcttcacttagaggaaagtatatgctgttggtcaactcattgaatctgatctgagttgattggttgatgactccaaactcccagacatgtaaattaaatctcaaacttgagaaatttggagtagattgtggcggcatgaagaagccaaaattgccagtgtaataattggagttcctgaaattaaatgtcggctctgaagcgaagacgaagataataactccccgagttgactcgttgattgattgattgcttcatcttgacataaagcttgtcgaattttgagagtcttgtatttgtgtagcccccgactctttggttagttgagaaacaactgaacatagagtcgagaactgtagcttcttgtcgtcgagtagtcattgcttgagtgaatatacgcatagaagatgtccgagtagaaatcttgaatattggaacaccacttgttgtagtaaaataacatggcattatacttgttgacgcatgccgagatgtcaaggctcctgtagatgtcgtggtcgacgaagtagcaaagcttgcgaaatagagtttgctaatgccgaagataataaagatgaggttgctccaccatggtgacaaagttgcatagccgtgatgaagtgaacacgagtcagcggcaacagaagcaaaccggtagtgaagacgcgcaattgtgaagataaaagcaccagtcggcggcggcataaccagtcggcgccggaagacgatgatgtccatcagtagtggtagcagtcggcagcagacgtaggcagcttgtgttgaagatgctgacgcctattagtggtggcggcgacgtggccagccgtgaagacgatagcaccagttggcgtcatacgaggtggccggtcggagaagatgtagacgtcctacaatggaggcataataggccagccgtgcaggcggaaacaccagtcggcggcggacaagggggccggtcggtgaaaacatagtcgcggcgacttaaaggccagccgtgcaggcggaaacaccaatcggcggcggacaaggcggccggtcggtgaagacgtagacgcccaacaacggcggcataaaggccagccgtgcaggcggaaacaccagtcggcggcggacgaggcggccggtcggtgaagacgtagacgcccaacaacggcggcataaaggccagccgtgcaggcggaaacaccagtcggcggcggacgaggcggccggtcggtgaagacgtagacgcccaacaacggcggcataaaggccagccgtgcaggcggaaacaccagtcggcggcggacgaggcggccggtcggtgaagacgtggacgcccaacagacggcggcataataggccagccctgcaggcggagacaccagtcggcggcggcgaagggaagccgatggtgatgttctgattgatccattcctgaagcgtaggaaataagcttaaagccatgaatcccttttatgcatatctggatctggatcctacagaacaaacagataggatgagtagtatctgatgtaaatataatactcgagaaaaattcaagcattttaaaatatttataaatatgtatttctcctctcgtcaattttgatttccccgagcagatgactcattacgtttaaacactctgcccgactagtcatagccactaagcaccgggagtcggcctaagcacttcaaaaacatgcatatgagtgacatgagttcgtcattaatggaacaaagttttgcgggtcggagtttactactcaggtacttttgcaattattaagagcagaaaataaattatcttatctctatgcttttgatttattccgaataatacttagcaccttgcgttattcggtccatctaacaagcccccgggtgctaggaatcggcccaaaggcaaccatcgacaaaccaaacagaaagcataggaagatgaaactccataactcgataggcacttttgtactcagattatatcgcaagcaatcaagacaaatattataaaaaaatgtttaaaaaatatgatataacatctgtagcccccgactcactagttaacggcgaaccagttaacatagtgaggcagaggaaaaaggaaaatatcatataaaaaataaaataatgatgacttagctttgcaatattccccttggtgatagcagaggtagccgatgtggagctaaagtcgtccatcaataacgacgaaaacaccggccatggaagcagccgaggcggccggcggtgaggtcgtagacgcccaaaaacagcggtggtgaagtcgtggatgcccatgaacggtgttgtgaccaaccaactgtataggcgaggacaccagtcggcggcgacggaggcaagccggcggtggagtcgttgttgatatcagcaatggcggtggtgaggacaagtcggcagagtggactcgcggccgatcgaccagaaagctgagacgcctcgagtccatgtccaacatcgttcgcctcagtagtgccgcgtagttatatgcgaacaacaacaaaaaatagcaagaaattaatctgagattagaaatcgatctaaatatggaaaattatgaaacggtcaggagatgtgcactcaggccaatattcggcacgaatcccggcaagagcaatcaacaggtgacatgcaaaaggcaacgtgcacgcgtatgctttctcgctcggcatgcaacatggccaaatctcctgtgtactgagttgcaggtagcaacaagccagcgaccgatccaggcctacgagcttcagcatgtcacgtggtcgccgagtggttcccgatgtaggcgtggatccgaactcgcatcgtgtgggctcggatttgcactgggaggaggctgatattgttgctcggcaacgtcgacgatgctggtaacaaaaataatacccgagtagatcaatctataattaaaaattaatctattgagagttaaattggaacgacaaacccaatatctcttcgtagattgatttgatcagaagatgatgccagcagcggtagaatccaggctgcttgaacaaatatgataccggagaagttgattccatcacacttttcgacgggaaactcgactcacccctacctggcgcgccaactgtcgaaacaaattttcggcaatatgaaaagggggtagcgcacgagacctaaaagtggatggataaagagacaaaggatttaaacaggttcaggccctctcgatgagaggtaataccctactcctgtttggggatttgaatccgccaggtgtatattgatctgacgatcagtttgtgtcatgccccctagaggacctcctacccaccttatatagggtgggggcaggattacaagattgaaaccttaaccaatacggtatcggtttcctaaatctactttacaatattatcaaaccaggactttaggccgttccgtaatatacaagaaaacgtaatacccaagtcatgatctgttacatattctatagatataagttatcccctatagccaatcggataaccatgccatgtggatatggggtacctataatctccacaaaatctatagttttgagatacgtcgtgttaaatatatagttttctgataatttaaccgaagtatacgtagttttatgaaatttgctataaaagaatgactcgaactactagaagctagctgaggctgttctcgggcaggcacccggcaaataatcacaagaatctcaagtagtcaagtttgattaggctagtataggaattttttttatttataattttttttattaaaagttttaaaaaataattttccattttgaaaattgacggaagtagtcgcctaccgcctcgccctctcagagggcggtgaaaatgacgtggcagacggccgttcgctctcgggcgacggccgtcaacgaaatttgcaggcggcccccttgccgccctccgctagggcgattttatactgtgcggggggccgcctgcaaatgggcggcgagggggggcatggaattttgcaggtggcccccttgccgccctccgctagggcgattttgtactgtgggggggccgcctgcaaatggacggcgagggggcatggaattttgcaggcggcccccttgtcgccctgggggagggcgatttttgcctctccccctataaagcccagtccctcctctgtgaaatttcattatattcactaaaaatccaaaaaaaacgaaagagagagaggggagggcagcagaaggggagcggcgaagccctgctggttcgctcaattcatcacaggtatgctcccatacatcttttgcatttgtactaatatgttatgtttgagtatatatgttgcgttttagttttagttccatatattttagcacatctgtagcacacagcacatatgtgtagatccagagcatagaatatgccccctcgccgcccatttgcaggcgcccccccgcacagtacaaaatcgccctcgcggagggcggcaagggggccgcctgcaaatttccatgcccccctcgccgcccatttgcaggcggccccccgcacagtacaaaatcgccctcgcggagggcggcaagggggccgcctgcaaatttcgttgacggccgtcgcccgagagcgaacggccgtctgccacgtcattttcgccgccctctgggagggcgattttcccagagggcggtaggcgactacttccgtcaattttcaaaatggaaaattatttttgtaaaacttttaataaaaaaaattaaaaataaaaaaaattcctagtataggccttatgggcctcgtctgtttatgtggacatcaagatgcgggcctgctgggcctataccagaaggtgtctaagtccggcccgtgagccggcacgtgtaccgtgtacgagtacgtgacaaccagataatcttgtgttttccaggtgatgggcagcatgtcttcccaccattttttttattgaaaataattaaaattggctacaactactggtgaacgtcatcattggtaccttacgtccttgttgccatgtcagtgcgaagctccagaagccattgctatattttttttcttaaaaaaaaatcacaaacctatgcaaaatgtcaatcttgtgtttctttgcatgttctagagataccataaataaatagtactagtaatgttttattttcctaatattataacacatttatttaccaggatcaatagataaggtgagtgtagcttaactggtgaagtccgctgtgatagaatcaacctatatatccagattaaatcctagagttaacacatatgcttgtattttaactaattattcttgtagtggtcgatgatgtactcgtcaacatagagacctatggtgacttcgtaaatttcaagatgtacagattcagtcttacgaaaatgctcgtatagataggttgtgtgtgtgcagtgtgtgtttataagaggtgagtatgtacacgttgtaaacatctataactctacatttatattgtgtttttttaaaagaaaagataatatttcatctctatcattatgcatttatttacacaggtcaaagagaatatcaggatctcaggacaggtgggggtcaagcctcatcatccggttttcttccttggttcccgcacgaaacgcttgcgcatcgggcgtcgacgtgtcggccaggttccagcgtggcagccgtctatacgtgcgcgcacgttgagtcagtcgtgcgcgccactactactgtatatctgctacctcaacatttttctcacccaccgaccagtgggccccaccccgtccgagtcagcggcaacggccggccccgcgcgaagcgcgcgcgcgccaaaaccaaaagagagactcctcgcctcgcctcgcctcgcgtcgcgcatggcgagccgagaccccgccgccgccttcgtctcttctcctcccgtttgctcccccgccaccaacggccgaccttaaccccgcgcccgcgcccaaccaccccgaccgcgttccggcggttgctgcaacctccccgccgccgccgccgccgccattcctccccccgcccgccggaaccaccgccgccgcgccatgcccatctcctccttgttcttcttcttcctcctcctgcagcaggaggacccctactagattcttcttctccctcttttgtcttctttcttggtacggcggcggaggaggagccgatgggcagcctttgctccaaggacagcgtcgccgaggagctcacgccgcagccgccgccggctgcggcagcggcggcggcgcccgtggggaggctgcagaagacggagagccagtcgttgaagcagctcatcacgctcaccgccaaggaggacgccgcggtggtcgcccccgtcgtgcacgccgtcatcacccgggcggagtccaacgccaaggccaagtccaacgccaaggccaagtccgccgccgccgtgccgccggtcgtcgtgatcacgtcgctcaacaagtcgtacagcaccgcgggtgcgcccgcacaccaccaccggctgtcgaccgtcgacgtcccgcaggtggtccccggcggcgtgccgcaggggttctccggcgagcacgtgatcgccgggtggccgtcgtggctgacctccgtcgccggcgaggtggtgcaggggtggctgccgcggcgcgccgacacgttcgagcggctggacaagatcgggcagggcacgtacagcaacgtgtacaaggcccgggacctggagaccggcaaggtcgtggcgctcaagcgcgtccgcttcgtcaacatggacccggagagcgtgcggttcatggcgcgggagatccacgtcctccgccgcctcgacggccaccccaacgtcgtccgcctcgagggcatcgtcacgtcgcgcctctcccacagcctctacctcgtcttcgagtacatggaccacgacctcgccggcctcgccgccacgccggggctgcgcttcacggagccgcaggtgaagtgcctcatggcgcagatcctcgccgggctgcgccactgccacgaccggggcgtgctccaccgcgacatcaagggcgccaacctgctgatcggcggcgacggcgcgctcaagatcgccgactttggcctcgccaccttcttcgacgccgccaggccgcagccgctcaccagccgcgtcgtcacgctctggtaccggccgccggagctcctcctcggcgccaccgagtacggcgtcgccgtcgacctctggagcaccggctgcatcctcgccgagcttctcgccggcaagcccatcttgcccggccaaaccgaggtaaatatatatatcatctatctatggatggatgaaatgggatcgggcatctgattcggcgccattgctgatcatcgacgcagatcgagcagctgcacaagatcttcaagctgtgcgggtcgccgtcggaggagtactgggcgaaggcgaagctgccggacgtgacgctgttcaagccgcagcggccgtaccggcggaagatcgccgagacgttcagggacttctcgccgccggcgctcgaccttctcgacacgctgctcgccatcgagccgtccgaccggggcaccgccgccgccgccctcgacagcgacgtaagcatgcacccccttctcctcccctccctctcctctcctcgctcgcatggatctctgacacgtactcgtgtcctctgctgctgctcagttcttcaggagcaagccgctggcgtgcgacccggcgagcttgcccaagctgccgccgagcaaggagtacgacgccaagctccgcggcaaggaggccgccatgaggcaaaacgcgacggcggccatcggaggcaagggctccatgtccgtcaagccggggaggaacgagcagtccaaggcggcggcgccggcgcaggacgccgttggaggagatcaccaggtacgtagctctttcattccgaattcatcgtcttcttcccctccgccggcgtcgtcgtcgtcgtcgtcaaatttctttgtgggtgcgtacgtgtgcagaggaggcaggcggcggcggcggcgcgcgtggtgaacccgaggagcgcgagccaccactacagctcgctggaggacagcgtgccggggttccgcatggagccgccggcggccgcggggccgccggcggcgatgcagagcggcgggttcgggtcgacgtggtacaggaaggaccacgccgccaccggcgacccgcgcgccaccacgtcacgcgcggccagcgcctccgtcagggtgtccaactccgtcgccggcggcgcgcagctcacgtcgcagcggtcgtacgcacattcccgcggcaccgacctccacccgagctcgtcggcggcgaggcacgccaactcccgctacaaccgcctcgacgtcgccgagcccgccaacgcgctcgaccggccgggctccagctccacccaccaaaaggacctctccgccgccgctccggccaccgtgagtaccgtaccgtaccatccacaccaccaccattcttacattcttgcctgttgctgtcgctgttgcaccagagtagttttcaaggggatgcttacttttttttttcatgtcgcttaaaaagttatcaaaaattttgaaaaaaaagagtaagatatatcaatatgtgatatatcactttataaacatgcatgtttaaatttgactcatacaaatagaaaagaaaaacaaatttttgttttgaattgtataagtcaaaattcaacttgcatgtttgtagaaagatatatcaaatattgatttatcttgataatttttttttaattttttatgacttttgaaacatcatgcacaaatcgagagatatctcctcgagcgacaaaaatccacttactaatcaaattcttgctaacatggtgatgaactctaacgccattaggggttcggagggaggaacaagaggatccactactccggcccgctggtgccgccgggcggcaacatggaggacatgctccgggagcacgagcggcagatccagcaggcggtgcgcaaggcgcgggtcgacaaggagaggacgaatcaccacggcaacagcagcagcagtaacaacaacaggcaatactactgagctacttgctgactactttggctggctcacacaaagctaaaggaagaagacgatcgatcgagctggtgcccatggccatggaaggtgcagatcatcttccatggccatctcagaccacgggcctgactgtctgatgagaagattgcaatgcaatgcagggagatgatcttcatggatggaggagagtagaaagaagacctgatgaggtgaagatctctgatggagggtgcaggcaggcagacggcgacagcgacggcggcgcggaactcggggtatagatatctgcaattgaagagctggggggcttttcttgatccatgtgtataaatagcacactgttagagagggttttgggaagtctgatgaggaggaacaagccctgtaaaaacacggattgtaaaaggccaaatggaaaactgtgtatatcttgctgatcgaagtgatgcaacagacttcaatgacctagtttgaaaaacaagaaaaagggatcatccatggcctattttttttccccataaaatggaacaaaatgcagtaacatagcgatactatgttcagaagcttctgaacatatgagaaaggattgacaaggaaaggtaagcaaccgtaggggagaaagaattggattcagcacaatactgatgcatgacatgaacaataaaattcttgtaaactctttcagacctatcagttggtagcaattgaggataacttactatgtactgttaccaaatcaatttaattttattgtgattccaagtcaagagctctgaggaatggattgcaatttctcgcttaattaaaacaaatgcaatactcacagaggactgagaaaagggtaatcggtgtacccgataactggatcagaagtgtagaacgtcgatctgtcatacttgttcagaggcgcattcagctcaaaccgcctaggcagatccgggtttgccaagaaccatttaccatatgctaccaggtctgtgtaaccctgagacactgctctattgccttcttctctgttgtatcctccagcgacgatgaaagtgccagcaaacactttcctgaagtgccatagcttgtaaggaatctgcaccttgccgtctactttgaccacctcaggctcaaccatgctgcagtagagaacgcccagcttgctcatggcttggatcatgtagaggccaagtgcatctgggtctgagtcccaacagtccaggcagtttgagtatggcgagagacggacacctactctgtccgatccgatctcatcgatggctgcttggattacctctagagcaaagcggcaacggtttgcgatgcttcctccgtacttgtcagttctgtcgttgacaccatctttcatgaactgttcaattaggtacccaaatgcgcagtggatttcaactccgtcaaagcctataatatcatggatgtaacaaattaaaacttctagttggatggtaccgtgaagttcatcaaaaggtaaattactgctagccaaaagcagtatttggactccaaattcttgcaagttacaactatgatggtacaatgctacagtttagccaacaaaatattgggaatggttatatgaagatgcatagattatggaagtacctgcttcaatgcaattcctagcagcaattcggaaatcatcaacaatttgggggatctcatcttctcttagcctccttggggcagagaattcctcgacagttccatctttgagaactgtaggagtgattttcttgtctgtacaaggaattggtgtttgtccattgggctgataatctgcaaatgttgctgtcagaggaacctgacaatcacgcaaaatgcaactcatatgaaagtttgactgttttgcttcacataaaaacattacagaccttgatagactaaactcagagaaagaagcaccatgccgtagtttgattttttttttttgtggaaacagagggaatggcttcatataaagaaaccagaattcagccatgtcaatttgatatgtggtgtttgatgatactgtgacctctgtaacgatccgattctagacttatttgaacagttgacactattttcacatgcaaacaacctgatattctaaatattccaatgtcctatcctacaagatgaaatgccacaactgcttttgaaaggattaaagtcaagcaggctcagaaaacttcagtttattgatcccatatgaaatttaccattgcaataaccaagttaagagtgaaattcatcaagcaacacgcattcataaaaatttcaatatatccaaacttgtaggaagataatgatatggataataataccattggtagatgccctccctacatgccagatttggcagaagaaaacaccacccttctgatgcactgcatccacaaccgtcctccaagcttccacctgctcctttgtccatatacccggtgtgtttggatacccttgagcagtctccgagaccccggtggcttcagcgatcagaaggccgccatttgtggccctctgcgagtagtacagctgaacatgttcttgaggaagattattgtagcacctcgatctggtcagcggcgcatggacaaccctaagaccaagaggaacacacacacacacacacacacacacacacagagaaatttcttgaggttagctagctccaaacatcaagattcgcccaggcagccaccctccaggctcagaggcaatccatcaaacaccttgagggcactaaaccttaacagctgaaaccgcagtgcagtaggcagtagccagacactaccttaactatgaggaagaattgttatctagataatcgattgatcgattaacgtcatccagttcgagggctgaagaatcctagcaagtagggagcgattgctattacaaaaccaaaggcgatggatggacatatagcagcacatacctgtgggcgaggtggaatctccccatggtgtgaggagtaaggaggggaattttcgcttccatgggtaacaaacagggtacgggagctgattccggtcttctgctcgagtggagaagaatcgagaggtgagggcaagaaccgctgacgtcatgtaggcagtgtggggaggcttttttgcgaatcatgcattgctgtgatttgatttgcacgacgagtacacaccgaaaaataaaagaaaataatcgttgcaatgtactatagtactccatttccctccatttcaggatagaagttttgcttttggtcaactattttaaatttaactaactctatagaaaaaatataatatttacaacagcagcatagtttcgttaaatcaataattgaataaatttttataatatattagtcttgaattaaaaatattactacttttttctaccaaattaattaaactaagaagtcaaaacgtttaataacctgaaacggagggagtactatattactaagtacatattactatcctcctctcagtttattataagtcgttttgattttttttatcaaacttatttaaacttgactaaatttatagaaaaattaaacaacatttataacattttatcaaataaaacattaaatataatttgacaatatatttattttgtgttaaaaatgttggtatatcattttttctaaatttgactagacaaaattaaaataactaataatatgaaacgggagaagactttgatttttttttccaaacttaaataagtatgattaaatttatagaaaaatataacaatattattatagatatattcaatcaatgttaggtctaataaaacttaatttgatattataaaagtggttatattcctctataaacctcattaaattaatacaagtttaaatctctacaacttaaaaaataagatgtgcttccatcgtccgtcaaaaaaatcggacaaaaaaaccagatttatccgtaaaaaaaccgggcggaaaagaagaaaaaaaccaaactgtccaataaaaaagggcgacaaaacgaaaaaccggcctaaaaaaccaaatctatctgatccagaaaaaaccggggaaaaaaaactaaacctgtccgatcaaaaaaaaaaagaggggcgaaaaaaaagaaaaaaatcggatctgaaacgaataaccgggcggaaaaaaaagaaaaaaaccaaactgtccaataaaaaagggcgaaaaaatgaaaaaccggcctaaaaaaccaaatctatccgatccagaaaaaaccggggaaaaaaaactaaacctgtccgatccaaaaaaaagaggggcgaaaaaaaagaaaaaaaatcggatctgaaacgaatccgactccgggtaaaaagaaagacgaaaaaaaattaaaaaaaaaagaatttgtccgattctctgtctctaaacgaaaaaaaatccaactctatgtccgattcccccttaaaaacgaaaaataaaaggcacctctcctccaggcggattggagatctgtttgcaaaaacagaacctacatgtcgagagcattctatttttatatgattttaatttttgggtatgtacttttgcattttgagtctctgtaatttttatatttacatttaagtccctacaatcttgcaataaggtatttgaggtcgtttttattaaaaaaaattaataataaaagagagataacaaaggcaggaaagtgcataaaaaaaaagaaaaaccacaaaaaataaatgaaaaaaaagaaaaaacaacaacaacaacaacaacaaaatgtctgtttcccctaagtggccaaaaaaaccatagacccgaaaaaaaatataaagctggttcgtatgaattaaaaaatgcacgcgagaaaaaaatagaatgggtgaaacaaagttagaaatcagtatatatctgttttctatctctaatctaatctaactatttaaaaagagaaaatgcatgagaaaataaaaacggttcaaaaaaaaggcgtgagaaaaaagtcagaaaaaagcgcaaaaaaaacactctaaaaaggttttccatcttccataaaaaaataagaaaagtgcgagaaaagttatttccatcgtcggtaaacttttttaaaaaaaaacatgcgaggaaaaaattgctagaaaaacgtgccatttctaaaaaatggtttgagaaaacctcgcaagaaaaaaaacaccgtctattaaaaaacaaatcgctctgaaaaaactatcagaaaacgctaaattgatggacgcttgtgtcggatagaatccatcaaatttttgccacctactacacggcttttatttcgtcatatattctcctgtattggaaaaaagaaaaaagaacaatcaatttgaaaacaatcatccaaacaaaacttgtagctgtttttttcccttcattaacttgtacagtaatgtgatccaggtaaaaacataatcatccaaacagaacataatgcaaggagatgatgatactttttattgttatgctctactatgattatattgaattttttttgcctcaccgtacgcttttgaaaggcttcaaaaatcggccggtcatgttggaaactcaagcagtatagacttgtttaaacagtttatcccaattttcgcatgccaacaaacattcaattctgcacaatccaacggcctatcctgcaacagttctgaacgattgaaaggctcagaaaacttcagtgaaccggtctgtatgaattttactgatcaccatacgataattaggtcctgtttgggggaacttctaggtgctgcagcttctccaagaatcttcagctcccccaaacagtacagattgtcactcagattatgagaatctatagttgtagaatccaaaaaataaactagaacctataagctggaaaacccagcttctccagattcttagaagctggctaccaaccagcagattcttataatcttaagttcccccaaacagggccttagccaatttaagagtgagatccatcgagcatggcacatgcataacattctcaatacatccaaactatgatcaactaattagtactacctccgttttttaatatatgacgttgttaactttttgacaatcatttgaccattcgccttatcaaaatttttgtacaaatattaaaaatattttagtcatgcttaaagaacatttgataataaattaagtcaaaataaaataaatgataattacatatatttttttgaataagaagaatggtcaaatgtatctcaaaaagtcagcgacgccatatattaaaaaaaaaggatggagtataccgtttctggagttttgagacaattttgaccagcagctatggttagcagcatttccaggaaaggaagactggaagaggcacacagcagcagagaagtatttcacattattggattcatgtaaagagttgttatctcaacaacagatcacacaagcacagaacaatacttgtatctgtctacaactctacaaccggttcagagcttgaattctacagaagcatcatccatgaacaatagggcagcataacccaagaatccaagatcaatagagaattcaacaactatttagcgccgatcattagatgccaatcggccaactgtgctcctgagtattactgtagcatttataagatcacatacagaaccaaaaaagggaacacttcttttctttcacaagattgaggtcatattgtcacgaacaaggagcataagcgttaaagagctcattcctggtttgtctctgcaatctccctcttgtaggcaagtagctgttctttgaatttcttgctctcttcgaagttagccttcctcttcaaagctttctgaatttcgtaagtccaaaatgcggtattcaggagaaggatttcatcttagaaaatcgcaagtcggtcatatgaatgagtaaaagagggcaagcagagataagctataacctcttgtcggaaacagcgatctagcttgattttaaggtctgtacactctccgaagaacttcttcacagggtgatccagatggcacttttggaactcctcgataatctggaagaacaaattctacaattagtttttgcctacatagtaaccactaaccagtttcgagaaaattacacaaggtacctcagcgcacataggatgcctgtgcaatgtcagagggggatgcatttccagagatagatggaaaacttaaactgcaaaaattgtcaaacgcattagtggtgaaatgtcccataattctatatgcacccaaatggaataaatacagcaaaaggcattgcattcatgacttatacgcacgcttatcaagaaatttccatggcacaaccatgggcctctctaatcaagctgaaaatctcacagccacacgcctcaagcaaatttcccagctccagatggccggtgacatacggttttacagtataaattaatgccatctgttgcagtgaaccatctcattaaacatctgaagaatcattcttcccaacatgtcgacagctctctatttgaaacagagaagcataaatctctctacataattcaccttagatcaaattgaatgggcccaaaaaaaatgtttctccccttttggtgtggcagtgctacgaagcatttgattgattgactgcgcaactaatgaggaatctacaagtgatctttgagatagcacaagcaagattacacaagcaaagggaaattatttgctcttttgccccaagtacagcgcacagatccggaccttagccgcaatcagacatccctcaagaacgaccaaatcacctcaactagtcaactcaagtactcagcacgcacatatgcaatcacgcgctggaaacgaaccggatttcggagagagggagaaaagaaagaacctactacgcgtcgtcgatgtcgtcggtggcagcggcgggcggcgggcgcggcggcggcgatgggggtgggcaggaggcggtggggagcggaagagaagagtgaagcgctgtggggtttggctcgtctctcggcgtccaaattgtcctccgttggggaaaaaaatgaagggtttgtttggttatttaccccacaaattcattggtaatgccaaattctagataagctttagcactaccaaaatattagtagagtaaaattatttggctaacatttggattgctattaatataaagtcaaattatcataatatagtgaagaaacttatagaatataaccaaataggataggggcactaccaaatatttgatctcaattcaaattaacacataaactattgcatttactaataaattggtagggcatgtttttttcaatcaaaccaaaactgcccgaaaatcctggcccagtttatcctggcggggattcttgcactttctttttgaactcccaggcaaaataacctaacttttttacacggttttctttaaaatttataaatagatgaataaggattttaaaaaatcaaaccttctcatcttcatcttcaggtttttaattttatagtttttaaaaatcacaccggtcatcactcattacttatttgacgtgctttgtttacttctctgacctgccatggtatctttttatcctcctcaggatttttaaaaataagattagagtttatttccttatcgaattatgtctttataaattttagaaatttcatcaaaatgctgtcactatattcattcacgatcctcccgttgcactcctctttattatcattttaggattttaaatatcaatgatcatttttttctttttatactttctagaaattctgccgaccatcgcgaccttactccttcacggtctgcatgccccccttctcttactcgtcgttaggattctaaaaatcgaatctgatcatcattagagtttcgttttatagtttttgatacccatcaaccgctgtggatttttcacattctaaacctttctgaaaacttattttataaataaaccctaaaaaacttatttaaaaaatagaccattttcactgcgccaacgttattggcaccgtggtccaatgggtgtcatcctcctaccctctccatgaaggctaagtcactaacgtgaagggagacgacgccaatgtaattgcgccgaagacctatatattaaaaaataaataaaaagtacatgtttataataaataggccctatgtataataaaaatatattcacaaataggcccttggtgcaaatggcgctagtgccaaagacctatttgtaaaaaaaaaaaatattacaaatcgttattttttgaaaaaagattacatataggtccttggcgccaataacatagacgttgttccccttcacaaaagtgacttagcttatccgaggaggctagggaaacggcgttggcgccggaaaagggtcctttgtaaggggtatatttgtaaaaaagaaaatcaaaaatgacaaaaagtgaaaaatcaagtcaaccgctaccatcatatatctttattattcgcccaatgtcttcccctctctttatgtcatttgccgctggtatgttctagatgaactacttttaatatttcttttttattccattttttctattatttctaaattgtgtttccacttgaactctcgttttttaacttcggaatttattttattttctatttattttattttatttttaaaatttattttacttttatttttgaattttaattaatttttctagtgcacattttaatttttcatggattttttaaatattcctttctttattttaacttttagttattttattaaatattattcatataacacttatctttatttttcaaatttcttattttttttattttatattccaaattttaattgattttgtgttgtgttttagatgatccttcattcaatattctttttttattctaaattttagttattcctaaattgtttttttcgcatgaactatcatttttatttttccaattttggaattcatttagtttttatttcaaatttaatctcgtactatgttatagatcgaccttttttcaatattccttatttttattccgaattttggttatttctgaattatattcctaccccattcatgttttgtcatctaataacaacaaaaaaaataataaaaaaattcaactaatatgggcggtcaaatgttgaacacaaaaacccacaacttcacttaaaatgggatagaaggatagtttctaggtggttcaatgtgtgcacgagacctgttggctagcgcgtgggccataagacggtaagagcacagtgagcagccactatttgggactattttatttatatattaatttagttttaaatttaaaaaattatattacttttttgaacattgataaaaaaatatactcttctcgccctctattcggacgaattttaaaaattattagagcgattcatgtgatgtggcagtacggggttcagaaatatttgcatttaggtctaaatatagtttttttttctacacataacacgtagtattggtacgatttgtaaaattctcatatgatgtcggatgaagttaaagtctatatgacaattgtagagctcgacgtgatctgtaatttgtagttgatatcttttccattaaaataatttatgggtccaaatattccttagaatatctcagtttttttttgcaaattatcagatctacatttttaatgacatcctatggaaacaatctctatatcaaagttgtagatctcgttgagatctataactttgtacttgaccactcattcatccaaaactatttagagtgtcaaataataaatagtaattttcagactagtgaaaaccaacgagagggggctaaaggaaaatataaacattttttgaagaacactataaatataaaattagtcatgcttgtttgacactctaaatagtttttggtcaacttctaaatagtttttagtcaactacaaagttatagatcatgtcgaactatacagttttgatatagattttatcttcatcggaggccatttcaaatgtatatccgagaatttgtaaaagtagatctgagacattctaagtaatatttggtcccataaattattttgaatggaaaaattatgaactacaaagttgtagatatcgtcgagctctacaatttttatataaactttaactttatctaatatcatatgagaattttacaaatcgtgcaagtactatgtgttatgtgttgctctaaattttacatttagagggtgagaaggacctaaatgcaaatatttctgaaccccgtgctgccacgtcacataaatcgctctctattagagcaatttttaaaaatcatatatttttgttaatgttaaaaacagtaatataattttataagttacaaaatacaaaatatataaataaaaaattcccgtatttggtgctctatctcgtttctcgtagtatgtctgccccccaccaccaaatctttctttctgcgcatctaggaatgcaagtgaatgaatccaatcccattccctatgcgaggtaataccttattgaagtagggtgtgctacgataacactggactgatacggtgggggcaggagtaatggctggcagcggcattcactctattgctctatgtgtattatccgtcccattttaagtgtaattgtgagtttagatatccaacgtttgacaatctgtgttatttaaaaaatttataaaaaataagtcgcgcataaaatattgtttatattttatcatctaataacaataaaaatactaatcataaaaaatttcaataaaacggacgatcaaacgttgggcacagaaacccacgaatgggacggagaaaatactttttccatgtctttcttcatcttctccataaggacatggaaagtaagcacggagtagtagaagacatttttcctctgattttgagcttggcaatattgttatagttgtacagtgcactacaattgtccgtgcatggatatatttttcctgacgagcacggacaatttctagtgagcaaagtctcggagcacaaggtggatagaaataacgtaactattatggccctgtttagttataggggtgaaaaattttggcgtgccacatcaaatatacagacacattttttgtcagggttatggataccacatacttaatagtagttgactaaatctcggcagtacccaccacataccatattttatacggaaacaaccttcggatataggagaagttccggataaggaaagacaactagagttctacatagaaacgacaaggactactcgcattgtatccatattggtttccatagttctacttggacaaggggacacgacacctatgggtataaatacaaagcccctaagagaagaggggacacgaagcaacatacaagccaacatacgccaagacaagacgctagatatcgacttcagagataaacatggctagtcccctacggtgcctacggataccgtcaggagagatatagcactgtcttttgatctcgccggatgcggattcgagaaggaagactaccctgttgtcgactacgtgtcaacacttcagaccgccaagtcgacaacagttagataaactaccccaaatattgtactggtgtgattattggattcgagaaggaagactaccctgttgtcgactacgtgtcaacacttcagaccgccaagtcgacaacagttagatagactaccccaaatattgtactggtgtgattatggtaaataagagcaacgaccggcttcggccaacaggatgtagggctattaccggtaagataaggggtccgaacctatataaaaatcatcgtccccatcttttttactacaatcttgcatataccctggtaccaacgatcccatactatgcaaataccggaatcacgacatcaaacatcggcacatttaaagtattaaacacagactaataacaaaataaattacagatttagttcccaaaacaaaatcttttcacccatcacatcgaatatttgaacatatgcatggagtattaaatgtcggaaaaaaaccaatttcacagttcgtgtaaattgcgagacgaatcttttaagcctaattgcgccatgatttgacaatgtggtgctacaataaacatttgctaatgacagattaattatgcttaataaattcgtctcgcggttttctaacagaatctgtaatttgtttagttattagattacttttaatactccaaatatctgtccgtatattcgatgtgacaccccaaaacaaaatttttcgccatctaaaccgggccaccgatcacacaatccctgcaattttgtcaactcctctcgatcacacaatcctcctctgacgtacgtcgtacttgcactacggagccgaaatcccaattcgatcgccgtacgcatgtacgtatacatgcgcgtacaccctggctagtcattgcggatgatggatcagggtcatgccacgccaaacgacgagacgtaactgccgtacgttgtgcatgcatatgtgtgcatcctcctagatcgacgacccagtcctatgcttgccagctaattaagcaagctaaaagtacgaattacccttctaaattattatggtcgaccaaattaccccgctgaactcgaaaaccaaacattactcgcactaaactttcaataccgaatgaattacctctctcgatctaatccagaacggttttgtcctgcatgtgtgcgtgtgacaattcaatcggcattttcttttaaaaatattagagggacagacatgtcatacctactcttcacatgttcctaattaatctctctctcgcggcgcaggtgcgcatggcggcgtgcagaggcgggcgatgggcacatcgaatttaaatcctagacttaacataagtactcgcatttatggttagcaagacactcgtagtgacttcattaattttaaaatatgatagtttagtgttgtttcatatatgctcatagagtagggtatgcatgtgtgtccatatgaaggaatttacgagttgagtgtgcatgtgtttatactgtgtttaaatattttttaaaagaatataacatttaatttacttattgtatcctcgaataattatcgcactacgtacaaccattgaaatcacaccctgagacggtgctcttttgagtggttcggaattttttttcttctgcacgaatgaaaatccttactaaaacgagatattagaagttacgatcgaaagtgtaacgagataagtcaatttgcaaacggtgctacactgccgttttgccgctttgccctgtgtcaaagagggaaaatactccgtgaaagaacggaagaaattagtaatgcgatccacgatttgtcctatccaccgtcgtcgaggcggctagttctagtatagctagcgacgttagagtggcatgacgtttctcatcgtgagagatgatcggtactgcagtagtattatactatcaatattattaaaaataaattaataatatcataattaattatgagtaactattatttatatttttcccggttaaattagtagttcattattcattacactggcacagttcaaattccatgaaaaaaataaaaaagaagaaaaaaagtttattcactattaaatttaaacgacttagtcactactaaatgacgattatattcctccgcactttttttttgcaataatgctcttttatttttctactaccgctaactggggtaatattataaataaatctgaaccattcgatcaaataagatgaataattcagattactttctactaccactagaataagatgaacgattcaggctactttctactaattacaaaacaccatattggggctcatcgtgagcacaatttcgtgtagaacctatgagtcgagtaaatattatatatttatttatttatttatttgtcactggcctagtggcctctccggctatcgcactactagcagccacagccatatatagctcgcaaagaagaaatccagtggctgtgtacatgttccgtggctaactgacgaccaaaccactgccttactgtcttactcccttcctcgtcgatggatgtcgtcaagaaggcggcggcggcggcggaagaggaggaggtccacggcgtggtcatcgtcggcggcggcctctgcggcctcgccaccgcgctcgccctccaccggtacgccgtcgtttcatacttgttctggaattaattaactctgaacacgccgtatatatagaaataaattgtgtatctgctgttaattggatgcagcaaagggatggggagcctcgtggtggagaggtcggaggcgctgcgtgtcggcggcgtggcgctcaacgtccacgccaacgggtggcgcgccctcgaggagctcggcctcgccgacggcctccggaaaaccgccaacctcatcacctcgtaagcataaatcgatcacttcttacggtggcctctatggcgaggacggtgcaattcatctgtgtgtgtcgtttcttcttcgctggggcttttatttcttagggttcgcatggtgcggcagatccagggcaagaaccagaccaccgtctcatctcccaggtgacgcgtgatcatcgatcagttctgccataccatcgatcagtttattactagttccattttgttgtttttttatattaaaaaaaactggcttatcagttactcctatgcgagatgtaggaaggagatccgatgcttgagaaggaaggacgtgatggaggcactggccaagagcgtccccgcgcacacgatccgctacggctgccgcatcgtggccgtcgatgaagaccccggcaccgactgtaccgtcctcaccatggccgacgacagcaccatcaaggccaaggtcaacaaatgctactagctctgtcctaaaatatacttcttccgtcttaaaatataagcattttaagatcctgacacagtttttgagatactactttgacaaacaatatttataaaagtaagatgttttaaataaaaaagagttacatattatgataatttgtttaatgataaatctagcaacattaattttatatgattgatcttttttttctattaatggtcaaagttaaaaatgtttgatttatcattgtactaaaaatatttatattttgggatggaggaaatagtaacttactctatttatattcgtggtaatagaatgtgtatatattttaaaacgatccatcatcggtcgattaattagaagtggattaataagtgtgattaatcgattctatgagttaataatggaggacttttacggtacattctactgctagtatatactatcagtatatttgatctaatggtgtaaattcatctgatcttcctcccaaatatcttgcagtataaattgtttagggtatatttatctttttatctatttgcgtggggggggggtaattttttaaattcgcgtttcctcatttggtcagatccgatcgatagctgcccacccagtcgaagccctttttttttctcgatgctgcgcgcatgggcaatcgtcgccgctaatttcttctgcgagctgccgacgaccacaatcggtgccgccgcgccgccgttctttcttaattaagttcaatgaattaaggacttggtatgtgttagggattcagacacttagaaactgatcgaatcaagaatgtatgagataatccacttcattgctgtgaacagatcaaatctatttacattattatgtggttttatccctgaccagttttttccctagtgttcttatgcaaatcatgcccattgcaaactcaatctactagattaaatccaatcgtcgaaggaatcgctacgcctccactcacgccatcgccacgcacgatgggagcgctacaacgcccggacgacgagatccaggaactcccgattgaatttaatcacaagaaataaatctcaatttcaaattattaaacaacccttttaagagttttaacaaataccaaatctaccctttcacatactgctaataccaaatctatcctttcacatactgctagtatcaaatctaccctttcacatactgctagtatatactagcagtagaatgtaccgtaaaaagtcctctaataatgttatacaggtggtgattggttgcgacgggtggaactcggtggtggccaggtacgtggggctaggcgcgccgtcgcagctccctcgtttcatcgtcctcggcttcgcgagctacccagaggggcacccgtttgggaccgagttctcgcaaatcatagcggatgattttgccgtcggacgggtgcccattaacgaaaatctgttgcatttcttcgtaagcaggagtccctcaccaggtataattaattaacctatggtttaataatggcattggcaggtaatttaattttaagcattaattaatttataaagtacacatgtgtcctgtaatattttgattcggatttacggttccttgatagtcgacgttttgataaagatgaagtcaaactttttaaaaaatttaactattaataacttttaaaaatatttagtttgatgatactaaagcaaacatatataaatttatcaaacaaagtactgtaataaaaataaaaatttgtttatttatttattgtatattactttctccgtttcacaatgtaagtcatcctaacattttccacattcatattgatgctaatgaatatatatatatatataatggattcattaacattaatataaatatggaaaatgctataatgtcttacattgtgaaatggagggagtacaatagaaaaatatggtaaaagataggagtaatatcactgtccaaaattaagaattacggagatgagtgactaattaattaactttgtcaagaacgtgtttatcgatccaggacgtacggacgttgatgaggacgcggcgaggaagtacgtgctggagaaggtcgacgagctccccggcgaggtcgccgacatggtgcgtcggtgcgacgcggcgtcgagctggacgctgacgaaggtgtggtaccggccgccgtggcaggtggcgctcgccgggttccggcgcggcgcggtgacggtcgccggcgacgcgatgcacgccatggggcccttcatcggccagggcggctccgcggggctggaggacgccgtcgtgctcgcccgctcgctgtcgtcggcggcggccggcgatggccgggcgccgccgcgtcagcagctgcgcgacgacgccgtcggcgcggcgatagacgagtacgtcgcggagaggcggcggagggcgacgacgctgtgcctgcacagcttcgccatcgggacgttgctgacgacgaggtggctcgccgtgaagctcgcgtgcgtcgccgtcctggcgctcctcggcggcgactcgcgccgtgatgcggactacgactgcggccgcctctagcggaccatccgtttcgtttattcgcgaaacaagtcaaacgatatatttataaactaaaagtaatttgtttttatatacgtgttcttaacgatcaaaaagcaaatgctgaaaataaacttcgatgaagaaatctcaaaaccagctttaaatttaatgttgcaaattcaaaatttaggttacacacaaggaaaaaaaagcactatgacgagaatagcatctataaacacaccttgttaatttagtaattagctcctctgggtggttaatcagtgagtatcatgttgattgttgaggtaggagtgcaacagtgagtatcagtacttattagtatgcaataaatccgatgataatcttgtttcaaaagctgaacaaaaggctgtggacatcactttgatttaggaagtccccgttcccacccccaccccccgcgttgcccacgcgctagcaacacggggggtgaaaaccctagcagcgccgccaccttccctctcccccctcccccacctcatcgccgttggaaagccggcgagcgagctatgatggtggcggcggggcttcctccatggcggcgaccactatcaggcgcgggagaggcggcgaacggcggcggcccatcctggcgaggagacggtggattcggcgctgccttcgccggatctggccatcccttggctcaggggcggaactgggcctagggcagcttgggcccgggccctactcatagcaaaatcgttagtgaattaatacccatatatttctcaaatttttacaaatcctcatggtccagccctactcgtctggcctagccccacatggcctttcccaggccccaggtgtcccagtcttcccagcccagtagacagcccagtagaaaagccaaccctagtccccacctcctcagctcctctcgtcttgctctcggctctccccatcacgcagacgcagcagcgccgccgcatcccgcttgtcctcgattcctcggcatcagcgctgcgcatcggggcggaagggagcggcgcacccgtgccacagcggcgcgaatcgatggaaggaggcagcgcgcataggaggcgtgtctcggcagcggcgcgcgcattggcgtcgagccggcgacgggccgacggcagcgggctagcagcgcttccgtagttcccctttctcatccacctcgcctcaaagcttggttcaccaaatctaggtcaatgtcctctctaatctttgatgttcgatctgcatccaacatccttattcttcttttgatagcaattagtctcaattagaaattggtttgattttttagatgaagaggaatagaactttaaaatcattctaccaagtcccaatccagtgagtccacttcaacccagaaacatgagaaacaatttgtaacttgcatcatttcagcaatgaaatatttaatttggtacttgatgaaattattgttgagttaaacaatcgctttgctgaaaggtctactcggctattaagatgcattgcttgtcttgatccaaggaattcttttaccaattatgatgaagataaggtcattgaacttgctaagatatatgtggctaactttttaaatattattgtatagtgcttagagatcaacttgacacatttagttcaacttgacatatttagtttaatcttgtttttttctatacttttactgtacttcgttgtatgattagaaattgtatttcagtcttgcattttttttcaacttcgttgtatgattagaaattgtatttcagtcttgcattttttttcaacagtgtatgcattgtatggtcctcatggatagttttagcctttaatttgagccctaggcgtgtagagatcctggctccgccactgccttggctagatccggccggagcgtgggagctggcggcggcgacagcgcggcgttggcagcagaggccgccgcggcatggcggggtgcgaggccagcgcggtggcataacaagggtagcggctacgacgcgatgacacgccagcaacggcgtgatgaggcggcggcgacgatgcgatgacacgccggcgacggcgcttgcactgctgctggcggcgcccgccgcggcaaggcggtcggccactgcagaggacggcaaggcgtagtggtgggagcccctggtgcccgacggtggtcggccgttggggacgacggcgacggcgtcggtggcagccgcggcaacacccgtggtggtagcagcagtggttgacggtgcggaggcagagctcgtcgcagcggcgattgcaagcacggagctcgtcgtggcggtcgcgtcagcggctggcaggcgacagcaggtggctggacgacggtagcagcggctgttgtagcgattgtggttgcggtgggaggatgcactgtggtggcgatcgtggctgaggtgggaggaggcatggtgtcctcggacggctagccgagggcgtggaagacggctgcatctggccggcgcggcagcgtttggaggagggtcgaagattggcttggcgcggcagcgtttggaggagggtcgaagattggcttggcgcagagagaagcagctgatggcagcggaggctggctcgacgcgagatggcgcgggcggcggaaatggaggacggcttggcgcgagaggcgcatcaggtggaggaggctagcttggcatgagaagcgcggccggcggtggaggaggcgacctcggtgcgaggagaagttgccagtgggtgtggcgcggcctacagcacacgaatgctggtcggcagggggcgccggtgcaagggtcccacatgtcgtcagaggttgagtggtggtggagcatcggtgcatcagccgtggattcgcaggtggtgagcggtgggtgaaaacccagcccggccttggccgaactgacaaggatggttaattcctccttctgagggcgttgtcatgctctcacccctaaaggttggttgccgggcgaaagccaagtcttggctcctttgagccccgacggacggtggcggcggttttccgtcgcttctcttcttgaagatttcgttatggcatcccctagctatggggcgatctcgtctgtgttcctttgttggtctagcggcgatcggtcacgcttagcggcggccggtccggtgctagccttctcccggatttgtgtgttggcgctgtcggtgtgtgggtggtggtatattttttccttttttccggattacaaccctccacagggttgtaatcttgtaatttttcctgctcaatcaaaattaactttgcagcgtctcatgctaggcgttcaaaaaaaaaaaacgttgaaggttgaggaggccatcggtgtgagggtgtccagtgttatcccaggagtggcccaaatagctgggccatcagtgtccttgtaggcttcaattcttgtaggccttcctttgttcgtgggcctattttggagtgggctgtagctgtccgtgtagggagtgagtgggcagaaatctgatagtcaagatttggctgaaattcatattcggctcacaattcatggaacatacggagagggatgcttctcactgccatccatacatttctctttgctacttgactgatgaacaaataatttctacttaaatgtttctaatcttaaaaatgaaattgatattttctaaaatcgtaggaattaatggcgattccagttcggttctaccgatatgtacagggagatcgccttataatacttgacgacctcgccgccgtcaattccggacatgcgcggcggcggttcttgcaccggcctcggcctccggtggccgtgccggcgttgccgcctccacggcgcggatggcgacggtgacgctgacaccgtgctcgacgtcgccgtcgtcgttgtctcctccggtggcgcaggagcatgacgacgtcgaccccgccgccccttgccgcccgaagctccagagccttctcagtgacctcagccgcgccaagctcggcgacgacctcgccgccgcgtcgcgcggggtcgtcgaagccgcggattcggggatctcgatcaccagcgtgctgcggccctccgctgtcatggtcaccgcgccggcgccatggtcggacaggccgagcaggacgctcgccgggaggctcacggtgtagctcgccggcggctccggcgggacgggaggaagaggcggcggcggcacgacgacggtgaggcggcagagcgggcaggtggagtgggagccgagccacatgtcgacgcactcggcgtggaagccgtggccgcaccgggggaggaacctggcctcctcgccgtcctcgagctccgcgaggcacaccgcgcactcgacgccgtcgtcgtcctcctcctcctcctccttcgccgccgccgccgccgtgctgcggctgtacaccgtgaccggcagcgaccggagcacctccgggtcgacccctcctcccgttccaccgtccccgccgctcccagagcgccgccgcggccgcggccgccgcccgcgcccgctcgtcgacgtcgtcgtcacggcgcggcgccgctcgtcgcagtagcactggagcaggacgaaggcgagcgtgagcgccgcgaagacgatgagcacggccgccacggtggcgatgccgccggccgtcatggctgcctgccctgcaggcgcggacaccggcgacggcgacgacgacgacgaagactcgtccatggcggggccgccctgctcgacaccccgcaccataataatcgaccgtcacatgcatatgtgaccgcgcgcactcgagctcgcgtcgcatatttatacacacacacacatagcggagtagtaggctagagtggtagatggaatgagacgcggtgagatgcgagcgcaagcagaggcttcctggaagggggatgcgcgcctgcggggcttgggcggcaagtacttgtgttggtgtttgctagcgcgcgcgcattcgtcttcgtcctcgtcttccaaacgagctatcaacgtcgtccgctgttgatgttgatgcaggcaaagtggtgtttgtgcgtgggcaacttccatttggtttgggtaccactactacagaacccaaatagatgtgctggttcataacaaaccggccctaattattaattataagaaccggttacgcgtataaaccggcaccgatatgtgccggttattttaaaaaaacaatatacaccaaccggttctatttattaaaaaaaccagggcaactatattcatccggccgcgcacttcagtacctgtgaatcctcctatatgtgcttgtttatttgaaaaaaatggtacctatagttctaaaacccacacctatactaatagggattggtacctataaattggttccggctgagaaaccgacacctatagtcaactagcaccaatatgaatttctccagcagtgtatggtgagatcgagttaaatcagttttggatcaacggatgcaatgtcctctactcctctcgttcatttgcatatcgtttaaatagtatgaaaagaaataagatatattaatatgtgatatatcattttaggaacatataacttagaaaaatatgattgtgagtacatatatactggttaaagttaggttttgttgttctaaactttaacatgtatgtttgtctagtgggtatatcacatatcaatatatcttgttaatctttttaagaacttttttttaaaaaatgggactatatagtgcatgtgcactaattagggcaaactagttgtcatcctgactaaatgatggaattaacatgtagctattttatttaaagcttaggtggtaggaatatattttctacttatttgctagatgaactagtacaaattagatttttctgaacatcacatttgcagacaacatcaaatgacctgcactaattagattacatatttaatttcaaactactctcttcatccaaaaataagtttattttttacttactccacacataacaatacaaaagctaatcctattcactttatcaaatcctaaatattattgtaattgttttttcactttatctacttccaatatcgtatatatcctctacttttacaaattctagtacaacgattgcttaaagataaactcatttcggaacggatgtggcattatttcgatgatacgcaatatggagcaaaacatccccggctataatccacacttccgatggcaatatgagcagtttttaagtttttcttttggactgattgggaccggaccgccgcgggtaacgaccgaagaagagcagaaaacagcaggtggccgcgcgcatgcagacaaactccagcctccaggttaccaagatgacgcttaaaacacgcacgaggaagccatgcgtgaggcagcaggaacgcccgggcttcgtcgcgagctcgcccagtccagctgccgacacggacatctgcggtcaaaaggacaaattaacttagacacgtgaagtacttcctccatcttaaaatgtatctacctagtactttctctgttttatattataagactttctagcattgctgacattcatatgtatgttaataaatctaacatatatgtgtgtttagattcattaatatctatataaatataggcaatgctagaaaatcttataaactaaaacggaggtagtactagatatgtatctacctagtactacgaatctgaacagcctcctatccaaatttgtattactagataatgtcacatctagtacttagatagttatatcttgagacggaggtagtaataattaaggcaaaatctaaatcaagaggcctctcgttttagtgctaacgagagaccctatttgccttagtactagttcccattaagtaagtagaaaatataatcctatcacctatgtttcaaataaaattttctcttaaactactcatccgatttatgattcgattacacggttgtgttcgtaaaaattaaatctttacaacaagatctcacatgattatattttgatgaaaaactacaaattacttttatggtatatctaaattacttttagatttcactaaattacttcttacacatataaaaataattttagtagagcttaaaagtaatttacatatattatagaagtaacttaagacaaaaaagaaagtaactttgtcatgacattaaaagtagatccgttatggaggtaaaaacgtgagtctatctaaaaattaaatttaatcagcacaaattatagaattgactaaaaaggataatagaataaacaactcacaacattatgattgtataataagtaatttaatcaaatcgaaaagtaatttatatatatatgataaaagtaacttacatatataataaaattaatttacaatatagatatttcttttatcaaaatatagtcatgtaagatcttgttgtaaagatttaattgaaacgaacacaatggtgtaatcggattaaaaatcggataaataatttaaaagaaaaatctataagaagaaaaaaaatgtatcatttggtgtactagtatgcaaccaggtctaagatgagtctctggttaagacaatatagagtgcggtctctatctagtcatgtccaataattaactgtaataccaaataccaaatctaccctttcacatactgctaataccaaatctatcctttcacatactgctagtatcaaatctaccctttcacatactgctagtatatactagcagtagaatgtaccgtaaaaagtcctctaataatgttatacaggtggtgattggttgcgacgggtggaactcggtggtggccaggtacgtggggctaggcgcgccgtcgcagctccctcgtttcatcgtcctcggcttcgcgagctacccagaggggcacccgtttgggaccgagttctcgcaaatcatagcggatgattttgccgtcggacgggtgcccattaacgaaaatctgttgcatttcttcgtaagcaggagtccctcaccaggtataattaattaacctatggtttaataatggcattggcaggtaatttaattttaagcattaattaatttataaagtacacatgtgtcctgtaatattttgattcggatttacggttccttgatagtcgacgttttgataaagatgaagtcaaactttttaaaaaatttaactattaataacttttaaaaatatttagtttgatgatactaaagcaaacatatataaatttatcaaacaaagtactgtaataaaaataaaaatttgtttatttatttattgtatattactttctccgtttcacaatgtaagtcatcctaacattttccacattcatattgatgctaatgaatatatatatatatatataatggattcattaacattaatataaatatggaaaatgctataatgtcttacattgtgaaatggagggagtacaatagaaaaatatggtaaaagataggagtaatatcactgtccaaaattaagaattacggagatgagtgactaattaattaactttgtcaagaacgtgtttatcgatccaggacgtacggacgttgatgaggacgcggcgaggaagtacgtgctggagaaggtcgacgagctccccggcgaggtcgccgacatggtgcgtcggtgcgacgcggcgtcgagctggacgctgacgaaggtgtggtaccggccgccgtggcaggtggcgctcgccgggttccggcgcggcgcggtgacggtcgccggcgacgcgatgcacgccatggggcccttcatcggccagggcggctccgcggggctggaggacgccgtcgtgctcgcccgctcgctgtcgtcggcggcggccggcgatggccgggcgccgccgcgtcagcagctgcgcgacgacgccgtcggcgcggcgatagacgagtacgtcgcggagaggcggcggagggcgacgacgctgtgcctgcacagcttcgccatcgggacgttgctgacgacgaggtggctcgccgtgaagctcgcgtgcgtcgccgtcctggcgctcctcggcggcgactcgcgccgtgatgcggactacgactgcggccgcctctagcggaccatccgtttcgtttattcgcgaaacaagtcaaacgatatatttataaactaaaagtaatttgtttttatatacgtgttcttaacgatcaaaaagcaaatgctgaaaataaacttcgatgaagaaatctcaaaaccagctttaaatttaatgttgcaaattcaaaatttaggttacacacaaggaaaaaaaagcactatgacgagaatagcatctataaacacaccttgttaatttagtaattagctcctctgggtggttaatcagtgagtatcatgttgattgttgaggtaggagtgcaacagtgagtatcagtacttattagtatgcaataaatccgatgataatcttgtttcaaaagctgaacaaaaggctgtggacatcactttgatttaggaagtccccgttcccacccccaccccccgcgttgcccacgcgctagcaacacggggggtgaaaaccctagcagcgccgccaccttccctctcccccctcccccacctcatcgccgttggaaagccggcgagcgagctatgatggtggcggcggggcttcctccatggcggcgaccactatcaggcgcgggagaggcggcgaacggcggcggcccatcctggcgaggagacggtggattcggcgctgccttcgccggatctggccatcccttggctcaggggcggaactgggcctagggcagcttgggcccgggccctactcatagcaaaatcgttagtgaattaatacccatatatttctcaaatttttacaaatcctcatggtccagccctactcgtctggcctagccccacatggcctttcccaggccccaggtgtcccagtcttcccagcccagtagacagcccagtagaaaagccaaccctagtccccacctcctcagctcctctcgtcttgctctcggctctccccatcacgcagacgcagcagcgccgccgcatcccgcttgtcctcgattcctcggcatcagcgctgcgcatcggggcggaagggagcggcgcacccgtgccacagcggcgcgaatcgatggaaggaggcagcgcgcataggaggcgtgtctcggcagcggcgcgcgcattggcgtcgagccggcgacgggccgacggcagcgggctagcagcgcttccgtagttcccctttctcatccacctcgcctcaaagcttggttcaccaaatctaggtcaatgtcctctctaatctttgatgttcgatctgcatccaacatccttattcttcttttgatagcaattagtctcaattagaaattggtttgattttttagatgaagaggaatagaactttaaaatcattctaccaagtcccaatccagtgagtccacttcaacccagaaacatgagaaacaatttgtaacttgcatcatttcagcaatgaaatatttaatttggtacttgatgaaattattgttgagttaaacaatcgctttgctgaaaggtctactcggctattaagatgcattgcttgtcttgatccaaggaattcttttaccaattatgatgaagataaggtcattgaacttgctaagatatatgtggctaactttttaaatattattgtatagtgcttagagatcaacttgacacatttagttcaacttgacatatttagtttaatcttgtttttttctatacttttactgtacttcgttgtatgattagaaattgtatttcagtcttgcattttttttcaacttcgttgtatgattagaaattgtatttcagtcttgcattttttttcaacagtgtatgcattgtatggtcctcatggatagttttagcctttaatttgagccctaggcgtgtagagatcctggctccgccactgccttggctagatccggccggagcgtgggagctggcggcggcgacagcgcggcgttggcagcagaggccgccgcggcatggcggggtgcgaggccagcgcggtggcataacaagggtagcggctacgacgcgatgacacgccagcaacggcgtgatgaggcggcggcgacgatgcgatgacacgccggcgacggcgcttgcactgctgctggcggcgcccgccgcggcaaggcggtcggccactgcagaggacggcaaggcgtagtggtgggagcccctggtgcccgacggtggtcggccgttggggacgacggcgacggcgtcggtggcagccgcggcaacacccgtggtggtagcagcagtggttgacggtgcggaggcagagctcgtcgcagcggcgattgcaagcacggagctcgtcgtggcggtcgcgtcagcggctggcaggcgacagcaggtggctggacgacggtagcagcggctgttgtagcgattgtggttgcggtgggaggatgcactgtggtggcgatcgtggctgaggtgggaggaggcatggtgtcctcggacggctagccgagggcgtggaagacggctgcatctggccggcgcggcagcgtttggaggagggtcgaagattggcttggcgcggcagcgtttggaggagggtcgaagattggcttggcgcagagagaagcagctgatggcagcggaggctggctcgacgcgagatggcgcgggcggcggaaatggaggacggcttggcgcgagaggcgcatcaggtggaggaggctagcttggcatgagaagcgcggccggcggtggaggaggcgacctcggtgcgaggagaagttgccagtgggtgtggcgcggcctacagcacacgaatgctggtcggcagggggcgccggtgcaagggtcccacatgtcgtcagaggttgagtggtggtggagcatcggtgcatcagccgtggattcgcaggtggtgagcggtgggtgaaaacccagcccggccttggccgaactgacaaggatggttaattcctccttctgagggcgttgtcatgctctcacccctaaaggttggttgccgggcgaaagccaagtcttggctcctttgagccccgacggacggtggcggcggttttccgtcgcttctcttcttgaagatttcgttatggcatcccctagctatggggcgatctcgtctgtgttcctttgttggtctagcggcgatcggtcacgcttagcggcggccggtccggtgctagccttctcccggatttgtgtgttggcgctgtcggtgtgtgggtggtggtatattttttccttttttccggattacaaccctccacagggttgtaatcttgtaatttttcctgctcaatcaaaattaactttgcagcgtctcatgctaggcgttcaaaaaaaaaaaacgttgaaggttgaggaggccatcggtgtgagggtgtccagtgttatcccaggagtggcccaaatagctgggccatcagtgtccttgtaggcttcaattcttgtaggccttcctttgttcgtgggcctattttggagtgggctgtagctgtccgtgtagggagtgagtgggcagaaatctgatagtcaagatttggctgaaattcatattcggctcacaattcatggaacatacggagagggatgcttctcactgccatccatacatttctctttgctacttgactgatgaacaaataatttctacttaaatgtttctaatcttaaaaatgaaattgatattttctaaaatcgtaggaattaatggcgattccagttcggttctaccgatatgtacagggagatcgccttataatacttgacgacctcgccgccgtcaattccggacatgcgcggcggcggttcttgcaccggcctcggcctccggtggccgtgccggcgttgccgcctccacggcgcggatggcgacggtgacgctgacaccgtgctcgacgtcgccgtcgtcgttgtctcctccggtggcgcaggagcatgacgacgtcgaccccgccgccccttgccgcccgaagctccagagccttctcagtgacctcagccgcgccaagctcggcgacgacctcgccgccgcgtcgcgcggggtcgtcgaagccgcggattcggggatctcgatcaccagcgtgctgcggccctccgctgtcatggtcaccgcgccggcgccatggtcggacaggccgagcaggacgctcgccgggaggctcacggtgtagctcgccggcggctccggcgggacgggaggaagaggcggcggcggcacgacgacggtgaggcggcagagcgggcaggtggagtgggagccgagccacatgtcgacgcactcggcgtggaagccgtggccgcaccgggggaggaacctggcctcctcgccgtcctcgagctccgcgaggcacaccgcgcactcgacgccgtcgtcgtcctcctcctcctcctccttcgccgccgccgccgccgtgctgcggctgtacaccgtgaccggcagcgaccggagcacctccgggtcgacccctcctcccgttccaccgtccccgccgctcccagagcgccgccgcggccgcggccgccgcccgcgcccgctcgtcgacgtcgtcgtcacggcgcggcgccgctcgtcgcagtagcactggagcaggacgaaggcgagcgtgagcgccgcgaagacgatgagcacggccgccacggtggcgatgccgccggccgtcatggctgcctgccctgcaggcgcggacaccggcgacggcgacgacgacgacgaagactcgtccatggcggggccgccctgctcgacaccccgcaccataataatcgaccgtcacatgcatatgtgaccgcgcgcactcgagctcgcgtcgcatatttatacacacacacacatagcggagtagtaggctagagtggtagatggaatgagacgcggtgagatgcgagcgcaagcagaggcttcctggaagggggatgcgcgcctgcggggcttgggcggcaagtacttgtgttggtgtttgctagcgcgcgcgcattcgtcttcgtcctcgtcttccaaacgagctatcaacgtcgtccgctgttgatgttgatgcaggcaaagtggtgtttgtgcgtgggcaacttccatttggtttgggtaccactactacagaacccaaatagatgtgctggttcataacaaaccggccctaattattaattataagaaccggttacgcgtataaaccggcaccgatatgtgccggttattttaaaaaaacaatatacaccaaccggttctatttattaaaaaaaccagggcaactatattcatccggccgcgcacttcagtacctgtgaatcctcctatatgtgcttgtttatttgaaaaaaatggtacctatagttctaaaacccacacctatactaatagggattggtacctataaattggttccggctgagaaaccgacacctatagtcaactagcaccaatatgaatttctccagcagtgtatggtgagatcgagttaaatcagttttggatcaacggatgcaatgtcctctactcctctcgttcatttgcatatcgtttaaatagtatgaaaagaaataagatatattaatatgtgatatatcattttaggaacatataacttagaaaaatatgattgtgagtacatatatactggttaaagttaggttttgttgttctaaactttaacatgtatgtttgtctagtgggtatatcacatatcaatatatcttgttaatctttttaagaacttttttttaaaaaatgggactatatagtgcatgtgcactaattagggcaaactagttgtcatcctgactaaatgatggaattaacatgtagctattttatttaaagcttaggtggtaggaatatattttctacttatttgctagatgaactagtacaaattagatttttctgaacatcacatttgcagacaacatcaaatgacctgcactaattagattacatatttaatttcaaactactctcttcatccaaaaataagtttattttttacttactccacacataacaatacaaaagctaatcctattcactttatcaaatcctaaatattattgtaattgttttttcactttatctacttccaatatcgtatatatcctctacttttacaaattctagtacaacgattgcttaaagataaactcatttcggaacggatgtggcattatttcgatgatacgcaatatggagcaaaacatccccggctataatccacacttccgatggcaatatgagcagtttttaagtttttcttttggactgattgggaccggaccgccgcgggtaacgaccgaagaagagcagaaaacagcaggtggccgcgcgcatgcagacaaactccagcctccaggttaccaagatgacgcttaaaacacgcacgaggaagccatgcgtgaggcagcaggaacgcccgggcttcgtcgcgagctcgcccagtccagctgccgacacggacatctgcggtcaaaaggacaaattaacttagacacgtgaagtacttcctccatcttaaaatgtatctacctagtactttctctgttttatattataagactttctagcattgctgacattcatatgtatgttaataaatctaacatatatgtgtgtttagattcattaatatctatataaatataggcaatgctagaaaatcttataaactaaaacggaggtagtactagatatgtatctacctagtactacgaatctgaacagcctcctatccaaatttgtattactagataatgtcacatctagtacttagatagttatatcttgagacggaggtagtaataattaaggcaaaatctaaatcaagaggcctctcgttttagtgctaacgagagaccctatttgccttagtactagttcccattaagtaagtagaaaatataatcctatcacctatgtttcaaataaaattttctcttaaactactcatccgatttatgattcgattacacggttgtgttcgtaaaaattaaatctttacaacaagatctcacatgattatattttgatgaaaaactacaaattacttttatggtatatctaaattacttttagatttcactaaattacttcttacacatataaaaataattttagtagagcttaaaagtaatttacatatattatagaagtaacttaagacaaaaaagaaagtaactttgtcatgacattaaaagtagatccgttatggaggtaaaaacgtgagtctatctaaaaattaaatttaatcagcacaaattatagaattgactaaaaaggataatagaataaacaactcacaacattatgattgtataataagtaatttaatcaaatcgaaaagtaatttatatatatatgataaaagtaacttacatatataataaaattaatttacaatatagatatttcttttatcaaaatatagtcatgtaagatcttgttgtaaagatttaattgaaacgaacacaatggtgtaatcggattaaaaatcggataaataatttaaaagaaaaatctataagaagaaaaaaaatgtatcatttggtgtactagtatgcaaccaggtctaagatgagtctctggttaagacaatatagagtgcggtctctatctagtcatgtccaataattaactgtaataccaaataccaaatctaccctttcacatactgctaataccaaatctatcctttcacatactgctagtatcaaatctaccctttcacatactgctagtatatactagcagtagaatgtaccgtaaaaagtcctctaataatgttatacaggtggtgattggttgcgacgggtggaactcggtggtggccaggtacgtggggctaggcgcgccgtcgcagctccctcgtttcatcgtcctcggcttcgcgagctacccagaggggcacccgtttgggaccgagttctcgcaaatcatagcggatgattttgccgtcggacgggtgcccattaacgaaaatctgttgcatttcttcgtaagcaggagtccctcaccaggtataattaattaacctatggtttaataatggcattggcaggtaatttaattttaagcattaattaatttataaagtacacatgtgtcctgtaatattttgattcggatttacggttccttgatagtcgacgttttgataaagatgaagtcaaactttttaaaaaatttaactattaataacttttaaaaatatttagtttgatgatactaaagcaaacatatataaatttatcaaacaaagtactgtaataaaaataaaaatttgtttatttatttattgtatattactttctccgtttcacaatgtaagtcatcctaacattttccacattcatattgatgctaatgaatatatatatatatatataatggattcattaacattaatataaatatggaaaatgctataatgtcttacattgtgaaatggagggagtacaatagaaaaatatggtaaaagataggagtaatatcactgtccaaaattaagaattacggagatgagtgactaattaattaactttgtcaagaacgtgtttatcgatccaggacgtacggacgttgatgaggacgcggcgaggaagtacgtgctggagaaggtcgacgagctccccggcgaggtcgccgacatggtgcgtcggtgcgacgcggcgtcgagctggacgctgacgaaggtgtggtaccggccgccgtggcaggtggcgctcgccgggttccggcgcggcgcggtgacggtcgccggcgacgcgatgcacgccatggggcccttcatcggccagggcggctccgcggggctggaggacgccgtcgtgctcgcccgctcgctgtcgtcggcggcggccggcgatggccgggcgccgccgcgtcagcagctgcgcgacgacgccgtcggcgcggcgatagacgagtacgtcgcggagaggcggcggagggcgacgacgctgtgcctgcacagcttcgccatcgggacgttgctgacgacgaggtggctcgccgtgaagctcgcgtgcgtcgccgtcctggcgctcctcggcggcgactcgcgccgtgatgcggactacgactgcggccgcctctagcggaccatccgtttcgtttattcgcgaaacaagtcaaacgatatatttataaactaaaagtaatttgtttttatatacgtgttcttaacgatcaaaaagcaaatgctgaaaataaacttcgatgaagaaatctcaaaaccagctttaaatttaatgttgcaaattcaaaatttaggttacacacaaggaaaaaaaagcactatgacgagaatagcatctataaacacaccttgttaatttagtaattagctcctctgggtggttaatcagtgagtatcatgttgattgttgaggtaggagtgcaacagtgagtatcagtacttattagtatgcaataaatccgatgataatcttgtttcaaaagctgaacaaaaggctgtggacatcactttgatttaggaagtccccgttcccacccccaccccccgcgttgcccacgcgctagcaacacggggggtgaaaaccctagcagcgccgccaccttccctctcccccctcccccacctcatcgccgttggaaagccggcgagcgagctatgatggtggcggcggggcttcctccatggcggcgaccactatcaggcgcgggagaggcggcgaacggcggcggcccatcctggcgaggagacggtggattcggcgctgccttcgccggatctggccatcccttggctcaggggcggaactgggcctagggcagcttgggcccgggccctactcatagcaaaatcgttagtgaattaatacccatatatttctcaaatttttacaaatcctcatggtccagccctactcgtctggcctagccccacatggcctttcccaggccccaggtgtcccagtcttcccagcccagtagacagcccagtagaaaagccaaccctagtccccacctcctcagctcctctcgtcttgctctcggctctccccatcacgcagacgcagcagcgccgccgcatcccgcttgtcctcgattcctcggcatcagcgctgcgcatcggggcggaagggagcggcgcacccgtgccacagcggcgcgaatcgatggaaggaggcagcgcgcataggaggcgtgtctcggcagcggcgcgcgcattggcgtcgagccggcgacgggccgacggcagcgggctagcagcgcttccgtagttcccctttctcatccacctcgcctcaaagcttggttcaccaaatctaggtcaatgtcctctctaatctttgatgttcgatctgcatccaacatccttattcttcttttgatagcaattagtctcaattagaaattggtttgattttttagatgaagaggaatagaactttaaaatcattctaccaagtcccaatccagtgagtccacttcaacccagaaacatgagaaacaatttgtaacttgcatcatttcagcaatgaaatatttaatttggtacttgatgaaattattgttgagttaaacaatcgctttgctgaaaggtctactcggctattaagatgcattgcttgtcttgatccaaggaattcttttaccaattatgatgaagataaggtcattgaacttgctaagatatatgtggctaactttttaaatattattgtatagtgcttagagatcaacttgacacatttagttcaacttgacatatttagtttaatcttgtttttttctatacttttactgtacttcgttgtatgattagaaattgtatttcagtcttgcattttttttcaacttcgttgtatgattagaaattgtatttcagtcttgcattttttttcaacagtgtatgcattgtatggtcctcatggatagttttagcctttaatttgagccctaggcgtgtagagatcctggctccgccactgccttggctagatccggccggagcgtgggagctggcggcggcgacagcgcggcgttggcagcagaggccgccgcggcatggcggggtgcgaggccagcgcggtggcataacaagggtagcggctacgacgcgatgacacgccagcaacggcgtgatgaggcggcggcgacgatgcgatgacacgccggcgacggcgcttgcactgctgctggcggcgcccgccgcggcaaggcggtcggccactgcagaggacggcaaggcgtagtggtgggagcccctggtgcccgacggtggtcggccgttggggacgacggcgacggcgtcggtggcagccgcggcaacacccgtggtggtagcagcagtggttgacggtgcggaggcagagctcgtcgcagcggcgattgcaagcacggagctcgtcgtggcggtcgcgtcagcggctggcaggcgacagcaggtggctggacgacggtagcagcggctgttgtagcgattgtggttgcggtgggaggatgcactgtggtggcgatcgtggctgaggtgggaggaggcatggtgtcctcggacggctagccgagggcgtggaagacggctgcatctggccggcgcggcagcgtttggaggagggtcgaagattggcttggcgcggcagcgtttggaggagggtcgaagattggcttggcgcagagagaagcagctgatggcagcggaggctggctcgacgcgagatggcgcgggcggcggaaatggaggacggcttggcgcgagaggcgcatcaggtggaggaggctagcttggcatgagaagcgcggccggcggtggaggaggcgacctcggtgcgaggagaagttgccagtgggtgtggcgcggcctacagcacacgaatgctggtcggcagggggcgccggtgcaagggtcccacatgtcgtcagaggttgagtggtggtggagcatcggtgcatcagccgtggattcgcaggtggtgagcggtgggtgaaaacccagcccggccttggccgaactgacaaggatggttaattcctccttctgagggcgttgtcatgctctcacccctaaaggttggttgccgggcgaaagccaagtcttggctcctttgagccccgacggacggtggcggcggttttccgtcgcttctcttcttgaagatttcgttatggcatcccctagctatggggcgatctcgtctgtgttcctttgttggtctagcggcgatcggtcacgcttagcggcggccggtccggtgctagccttctcccggatttgtgtgttggcgctgtcggtgtgtgggtggtggtatattttttccttttttccggattacaaccctccacagggttgtaatcttgtaatttttcctgctcaatcaaaattaactttgcagcgtctcatgctaggcgttcaaaaaaaaaaaacgttgaaggttgaggaggccatcggtgtgagggtgtccagtgttatcccaggagtggcccaaatagctgggccatcagtgtccttgtaggcttcaattcttgtaggccttcctttgttcgtgggcctattttggagtgggctgtagctgtccgtgtagggagtgagtgggcagaaatctgatagtcaagatttggctgaaattcatattcggctcacaattcatggaacatacggagagggatgcttctcactgccatccatacatttctctttgctacttgactgatgaacaaataatttctacttaaatgtttctaatcttaaaaatgaaattgatattttctaaaatcgtaggaattaatggcgattccagttcggttctaccgatatgtacagggagatcgccttataatacttgacgacctcgccgccgtcaattccggacatgcgcggcggcggttcttgcaccggcctcggcctccggtggccgtgccggcgttgccgcctccacggcgcggatggcgacggtgacgctgacaccgtgctcgacgtcgccgtcgtcgttgtctcctccggtggcgcaggagcatgacgacgtcgaccccgccgccccttgccgcccgaagctccagagccttctcagtgacctcagccgcgccaagctcggcgacgacctcgccgccgcgtcgcgcggggtcgtcgaagccgcggattcggggatctcgatcaccagcgtgctgcggccctccgctgtcatggtcaccgcgccggcgccatggtcggacaggccgagcaggacgctcgccgggaggctcacggtgtagctcgccggcggctccggcgggacgggaggaagaggcggcggcggcacgacgacggtgaggcggcagagcgggcaggtggagtgggagccgagccacatgtcgacgcactcggcgtggaagccgtggccgcaccgggggaggaacctggcctcctcgccgtcctcgagctccgcgaggcacaccgcgcactcgacgccgtcgtcgtcctcctcctcctcctccttcgccgccgccgccgccgtgctgcggctgtacaccgtgaccggcagcgaccggagcacctccgggtcgacccctcctcccgttccaccgtccccgccgctcccagagcgccgccgcggccgcggccgccgcccgcgcccgctcgtcgacgtcgtcgtcacggcgcggcgccgctcgtcgcagtagcactggagcaggacgaaggcgagcgtgagcgccgcgaagacgatgagcacggccgccacggtggcgatgccgccggccgtcatggctgcctgccctgcaggcgcggacaccggcgacggcgacgacgacgacgaagactcgtccatggcggggccgccctgctcgacaccccgcaccataataatcgaccgtcacatgcatatgtgaccgcgcgcactcgagctcgcgtcgcatatttatacacacacacacatagcggagtagtaggctagagtggtagatggaatgagacgcggtgagatgcgagcgcaagcagaggcttcctggaagggggatgcgcgcctgcggggcttgggcggcaagtacttgtgttggtgtttgctagcgcgcgcgcattcgtcttcgtcctcgtcttccaaacgagctatcaacgtcgtccgctgttgatgttgatgcaggcaaagtggtgtttgtgcgtgggcaacttccatttggtttgggtaccactactacagaacccaaatagatgtgctggttcataacaaaccggccctaattattaattataagaaccggttacgcgtataaaccggcaccgatatgtgccggttattttaaaaaaacaatatacaccaaccggttctatttattaaaaaaaccagggcaactatattcatccggccgcgcacttcagtacctgtgaatcctcctatatgtgcttgtttatttgaaaaaaatggtacctatagttctaaaacccacacctatactaatagggattggtacctataaattggttccggctgagaaaccgacacctatagtcaactagcaccaatatgaatttctccagcagtgtatggtgagatcgagttaaatcagttttggatcaacggatgcaatgtcctctactcctctcgttcatttgcatatcgtttaaatagtatgaaaagaaataagatatattaatatgtgatatatcattttaggaacatataacttagaaaaatatgattgtgagtacatatatactggttaaagttaggttttgttgttctaaactttaacatgtatgtttgtctagtgggtatatcacatatcaatatatcttgttaatctttttaagaacttttttttaaaaaatgggactatatagtgcatgtgcactaattagggcaaactagttgtcatcctgactaaatgatggaattaacatgtagctattttatttaaagcttaggtggtaggaatatattttctacttatttgctagatgaactagtacaaattagatttttctgaacatcacatttgcagacaacatcaaatgacctgcactaattagattacatatttaatttcaaactactctcttcatccaaaaataagtttattttttacttactccacacataacaatacaaaagctaatcctattcactttatcaaatcctaaatattattgtaattgttttttcactttatctacttccaatatcgtatatatcctctacttttacaaattctagtacaacgattgcttaaagataaactcatttcggaacggatgtggcattatttcgatgatacgcaatatggagcaaaacatccccggctataatccacacttccgatggcaatatgagcagtttttaagtttttcttttggactgattgggaccggaccgccgcgggtaacgaccgaagaagagcagaaaacagcaggtggccgcgcgcatgcagacaaactccagcctccaggttaccaagatgacgcttaaaacacgcacgaggaagccatgcgtgaggcagcaggaacgcccgggcttcgtcgcgagctcgcccagtccagctgccgacacggacatctgcggtcaaaaggacaaattaacttagacacgtgaagtacttcctccatcttaaaatgtatctacctagtactttctctgttttatattataagactttctagcattgctgacattcatatgtatgttaataaatctaacatatatgtgtgtttagattcattaatatctatataaatataggcaatgctagaaaatcttataaactaaaacggaggtagtactagatatgtatctacctagtactacgaatctgaacagcctcctatccaaatttgtattactagataatgtcacatctagtacttagatagttatatcttgagacggaggtagtaataattaaggcaaaatctaaatcaagaggcctctcgttttagtgctaacgagagaccctatttgccttagtactagttcccattaagtaagtagaaaatataatcctatcacctatgtttcaaataaaattttctcttaaactactcatccgatttatgattcgattacacggttgtgttcgtaaaaattaaatctttacaacaagatctcacatgattatattttgatgaaaaactacaaattacttttatggtatatctaaattacttttagatttcactaaattacttcttacacatataaaaataattttagtagagcttaaaagtaatttacatatattatagaagtaacttaagacaaaaaagaaagtaactttgtcatgacattaaaagtagatccgttatggaggtaaaaacgtgagtctatctaaaaattaaatttaatcagcacaaattatagaattgactaaaaaggataatagaataaacaactcacaacattatgattgtataataagtaatttaatcaaatcgaaaagtaatttatatatatatgataaaagtaacttacatatataataaaattaatttacaatatagatatttcttttatcaaaatatagtcatgtaagatcttgttgtaaagatttaattgaaacgaacacaatggtgtaatcggattaaaaatcggataaataatttaaaagaaaaatctataagaagaaaaaaaatgtatcatttggtgtactagtatgcaaccaggtctaagatgagtctctggttaagacaatatagagtgcggtctctatctagtcatgtccaataattaactgtaataccaaataccaaatctaccctttcacatactgctaataccaaatctatcctttcacatactgctagtatcaaatctaccctttcacatactgctagtatatactagcagtagaatgtaccgtaaaaagtcctctaataatgttatacaggtggtgattggttgcgacgggtggaactcggtggtggccaggtacgtggggctaggcgcgccgtcgcagctccctcgtttcatcgtcctcggcttcgcgagctacccagaggggcacccgtttgggaccgagttctcgcaaatcatagcggatgattttgccgtcggacgggtgcccattaacgaaaatctgttgcatttcttcgtaagcaggagtccctcaccaggtataattaattaacctatggtttaataatggcattggcaggtaatttaattttaagcattaattaatttataaagtacacatgtgtcctgtaatattttgattcggatttacggttccttgatagtcgacgttttgataaagatgaagtcaaactttttaaaaaatttaactattaataacttttaaaaatatttagtttgatgatactaaagcaaacatatataaatttatcaaacaaagtactgtaataaaaataaaaatttgtttatttatttattgtatattactttctccgtttcacaatgtaagtcatcctaacattttccacattcatattgatgctaatgaatatatatatatatatataatggattcattaacattaatataaatatggaaaatgctataatgtcttacattgtgaaatggagggagtacaatagaaaaatatggtaaaagataggagtaatatcactgtccaaaattaagaattacggagatgagtgactaattaattaactttgtcaagaacgtgtttatcgatccaggacgtacggacgttgatgaggacgcggcgaggaagtacgtgctggagaaggtcgacgagctccccggcgaggtcgccgacatggtgcgtcggtgcgacgcggcgtcgagctggacgctgacgaaggtgtggtaccggccgccgtggcaggtggcgctcgccgggttccggcgcggcgcggtgacggtcgccggcgacgcgatgcacgccatggggcccttcatcggccagggcggctccgcggggctggaggacgccgtcgtgctcgcccgctcgctgtcgtcggcggcggccggcgatggccgggcgccgccgcgtcagcagctgcgcgacgacgccgtcggcgcggcgatagacgagtacgtcgcggagaggcggcggagggcgacgacgctgtgcctgcacagcttcgccatcgggacgttgctgacgacgaggtggctcgccgtgaagctcgcgtgcgtcgccgtcctggcgctcctcggcggcgactcgcgccgtgatgcggactacgactgcggccgcctctagcggaccatccgtttcgtttattcgcgaaacaagtcaaacgatatatttataaactaaaagtaatttgtttttatatacgtgttcttaacgatcaaaaagcaaatgctgaaaataaacttcgatgaagaaatctcaaaaccagctttaaatttaatgttgcaaattcaaaatttaggttacacacaaggaaaaaaaagcactatgacgagaatagcatctataaacacaccttgttaatttagtaattagctcctctgggtggttaatcagtgagtatcatgttgattgttgaggtaggagtgcaacagtgagtatcagtacttattagtatgcaataaatccgatgataatcttgtttcaaaagctgaacaaaaggctgtggacatcactttgatttaggaagtccccgttcccacccccaccccccgcgttgcccacgcgctagcaacacggggggtgaaaaccctagcagcgccgccaccttccctctcccccctcccccacctcatcgccgttggaaagccggcgagcgagctatgatggtggcggcggggcttcctccatggcggcgaccactatcaggcgcgggagaggcggcgaacggcggcggcccatcctggcgaggagacggtggattcggcgctgccttcgccggatctggccatcccttggctcaggggcggaactgggcctagggcagcttgggcccgggccctactcatagcaaaatcgttagtgaattaatacccatatatttctcaaatttttacaaatcctcatggtccagccctactcgtctggcctagccccacatggcctttcccaggccccaggtgtcccagtcttcccagcccagtagacagcccagtagaaaagccaaccctagtccccacctcctcagctcctctcgtcttgctctcggctctccccatcacgcagacgcagcagcgccgccgcatcccgcttgtcctcgattcctcggcatcagcgctgcgcatcggggcggaagggagcggcgcacccgtgccacagcggcgcgaatcgatggaaggaggcagcgcgcataggaggcgtgtctcggcagcggcgcgcgcattggcgtcgagccggcgacgggccgacggcagcgggctagcagcgcttccgtagttcccctttctcatccacctcgcctcaaagcttggttcaccaaatctaggtcaatgtcctctctaatctttgatgttcgatctgcatccaacatccttattcttcttttgatagcaattagtctcaattagaaattggtttgattttttagatgaagaggaatagaactttaaaatcattctaccaagtcccaatccagtgagtccacttcaacccagaaacatgagaaacaatttgtaacttgcatcatttcagcaatgaaatatttaatttggtacttgatgaaattattgttgagttaaacaatcgctttgctgaaaggtctactcggctattaagatgcattgcttgtcttgatccaaggaattcttttaccaattatgatgaagataaggtcattgaacttgctaagatatatgtggctaactttttaaatattattgtatagtgcttagagatcaacttgacacatttagttcaacttgacatatttagtttaatcttgtttttttctatacttttactgtacttcgttgtatgattagaaattgtatttcagtcttgcattttttttcaacttcgttgtatgattagaaattgtatttcagtcttgcattttttttcaacagtgtatgcattgtatggtcctcatggatagttttagcctttaatttgagccctaggcgtgtagagatcctggctccgccactgccttggctagatccggccggagcgtgggagctggcggcggcgacagcgcggcgttggcagcagaggccgccgcggcatggcggggtgcgaggccagcgcggtggcataacaagggtagcggctacgacgcgatgacacgccagcaacggcgtgatgaggcggcggcgacgatgcgatgacacgccggcgacggcgcttgcactgctgctggcggcgcccgccgcggcaaggcggtcggccactgcagaggacggcaaggcgtagtggtgggagcccctggtgcccgacggtggtcggccgttggggacgacggcgacggcgtcggtggcagccgcggcaacacccgtggtggtagcagcagtggttgacggtgcggaggcagagctcgtcgcagcggcgattgcaagcacggagctcgtcgtggcggtcgcgtcagcggctggcaggcgacagcaggtggctggacgacggtagcagcggctgttgtagcgattgtggttgcggtgggaggatgcactgtggtggcgatcgtggctgaggtgggaggaggcatggtgtcctcggacggctagccgagggcgtggaagacggctgcatctggccggcgcggcagcgtttggaggagggtcgaagattggcttggcgcggcagcgtttggaggagggtcgaagattggcttggcgcagagagaagcagctgatggcagcggaggctggctcgacgcgagatggcgcgggcggcggaaatggaggacggcttggcgcgagaggcgcatcaggtggaggaggctagcttggcatgagaagcgcggccggcggtggaggaggcgacctcggtgcgaggagaagttgccagtgggtgtggcgcggcctacagcacacgaatgctggtcggcagggggcgccggtgcaagggtcccacatgtcgtcagaggttgagtggtggtggagcatcggtgcatcagccgtggattcgcaggtggtgagcggtgggtgaaaacccagcccggccttggccgaactgacaaggatggttaattcctccttctgagggcgttgtcatgctctcacccctaaaggttggttgccgggcgaaagccaagtcttggctcctttgagccccgacggacggtggcggcggttttccgtcgcttctcttcttgaagatttcgttatggcatcccctagctatggggcgatctcgtctgtgttcctttgttggtctagcggcgatcggtcacgcttagcggcggccggtccggtgctagccttctcccggatttgtgtgttggcgctgtcggtgtgtgggtggtggtatattttttccttttttccggattacaaccctccacagggttgtaatcttgtaatttttcctgctcaatcaaaattaactttgcagcgtctcatgctaggcgttcaaaaaaaaaaaacgttgaaggttgaggaggccatcggtgtgagggtgtccagtgttatcccaggagtggcccaaatagctgggccatcagtgtccttgtaggcttcaattcttgtaggccttcctttgttcgtgggcctattttggagtgggctgtagctgtccgtgtagggagtgagtgggcagaaatctgatagtcaagatttggctgaaattcatattcggctcacaattcatggaacatacggagagggatgcttctcactgccatccatacatttctctttgctacttgactgatgaacaaataatttctacttaaatgtttctaatcttaaaaatgaaattgatattttctaaaatcgtaggaattaatggcgattccagttcggttctaccgatatgtacagggagatcgccttataatacttgacgacctcgccgccgtcaattccggacatgcgcggcggcggttcttgcaccggcctcggcctccggtggccgtgccggcgttgccgcctccacggcgcggatggcgacggtgacgctgacaccgtgctcgacgtcgccgtcgtcgttgtctcctccggtggcgcaggagcatgacgacgtcgaccccgccgccccttgccgcccgaagctccagagccttctcagtgacctcagccgcgccaagctcggcgacgacctcgccgccgcgtcgcgcggggtcgtcgaagccgcggattcggggatctcgatcaccagcgtgctgcggccctccgctgtcatggtcaccgcgccggcgccatggtcggacaggccgagcaggacgctcgccgggaggctcacggtgtagctcgccggcggctccggcgggacgggaggaagaggcggcggcggcacgacgacggtgaggcggcagagcgggcaggtggagtgggagccgagccacatgtcgacgcactcggcgtggaagccgtggccgcaccgggggaggaacctggcctcctcgccgtcctcgagctccgcgaggcacaccgcgcactcgacgccgtcgtcgtcctcctcctcctcctccttcgccgccgccgccgccgtgctgcggctgtacaccgtgaccggcagcgaccggagcacctccgggtcgacccctcctcccgttccaccgtccccgccgctcccagagcgccgccgcggccgcggccgccgcccgcgcccgctcgtcgacgtcgtcgtcacggcgcggcgccgctcgtcgcagtagcactggagcaggacgaaggcgagcgtgagcgccgcgaagacgatgagcacggccgccacggtggcgatgccgccggccgtcatggctgcctgccctgcaggcgcggacaccggcgacggcgacgacgacgacgaagactcgtccatggcggggccgccctgctcgacaccccgcaccataataatcgaccgtcacatgcatatgtgaccgcgcgcactcgagctcgcgtcgcatatttatacacacacacacatagcggagtagtaggctagagtggtagatggaatgagacgcggtgagatgcgagcgcaagcagaggcttcctggaagggggatgcgcgcctgcggggcttgggcggcaagtacttgtgttggtgtttgctagcgcgcgcgcattcgtcttcgtcctcgtcttccaaacgagctatcaacgtcgtccgctgttgatgttgatgcaggcaaagtggtgtttgtgcgtgggcaacttccatttggtttgggtaccactactacagaacccaaatagatgtgctggttcataacaaaccggccctaattattaattataagaaccggttacgcgtataaaccggcaccgatatgtgccggttattttaaaaaaacaatatacaccaaccggttctatttattaaaaaaaccagggcaactatattcatccggccgcgcacttcagtacctgtgaatcctcctatatgtgcttgtttatttgaaaaaaatggtacctatagttctaaaacccacacctatactaatagggattggtacctataaattggttccggctgagaaaccgacacctatagtcaactagcaccaatatgaatttctccagcagtgtatggtgagatcgagttaaatcagttttggatcaacggatgcaatgtcctctactcctctcgttcatttgcatatcgtttaaatagtatgaaaagaaataagatatattaatatgtgatatatcattttaggaacatataacttagaaaaatatgattgtgagtacatatatactggttaaagttaggttttgttgttctaaactttaacatgtatgtttgtctagtgggtatatcacatatcaatatatcttgttaatctttttaagaacttttttttaaaaaatgggactatatagtgcatgtgcactaattagggcaaactagttgtcatcctgactaaatgatggaattaacatgtagctattttatttaaagcttaggtggtaggaatatattttctacttatttgctagatgaactagtacaaattagatttttctgaacatcacatttgcagacaacatcaaatgacctgcactaattagattacatatttaatttcaaactactctcttcatccaaaaataagtttattttttacttactccacacataacaatacaaaagctaatcctattcactttatcaaatcctaaatattattgtaattgttttttcactttatctacttccaatatcgtatatatcctctacttttacaaattctagtacaacgattgcttaaagataaactcatttcggaacggatgtggcattatttcgatgatacgcaatatggagcaaaacatccccggctataatccacacttccgatggcaatatgagcagtttttaagtttttcttttggactgattgggaccggaccgccgcgggtaacgaccgaagaagagcagaaaacagcaggtggccgcgcgcatgcagacaaactccagcctccaggttaccaagatgacgcttaaaacacgcacgaggaagccatgcgtgaggcagcaggaacgcccgggcttcgtcgcgagctcgcccagtccagctgccgacacggacatctgcggtcaaaaggacaaattaacttagacacgtgaagtacttcctccatcttaaaatgtatctacctagtactttctctgttttatattataagactttctagcattgctgacattcatatgtatgttaataaatctaacatatatgtgtgtttagattcattaatatctatataaatataggcaatgctagaaaatcttataaactaaaacggaggtagtactagatatgtatctacctagtactacgaatctgaacagcctcctatccaaatttgtattactagataatgtcacatctagtacttagatagttatatcttgagacggaggtagtaataattaaggcaaaatctaaatcaagaggcctctcgttttagtgctaacgagagaccctatttgccttagtactagttcccattaagtaagtagaaaatataatcctatcacctatgtttcaaataaaattttctcttaaactactcatccgatttatgattcgattacacggttgtgttcgtaaaaattaaatctttacaacaagatctcacatgattatattttgatgaaaaactacaaattacttttatggtatatctaaattacttttagatttcactaaattacttcttacacatataaaaataattttagtagagcttaaaagtaatttacatatattatagaagtaacttaagacaaaaaagaaagtaactttgtcatgacattaaaagtagatccgttatggaggtaaaaacgtgagtctatctaaaaattaaatttaatcagcacaaattatagaattgactaaaaaggataatagaataaacaactcacaacattatgattgtataataagtaatttaatcaaatcgaaaagtaatttatatatatatgataaaagtaacttacatatataataaaattaatttacaatatagatatttcttttatcaaaatatagtcatgtaagatcttgttgtaaagatttaattgaaacgaacacaatggtgtaatcggattaaaaatcggataaataatttaaaagaaaaatctataagaagaaaaaaaatgtatcatttggtgtactagtatgcaaccaggtctaagatgagtctctggttaagacaatatagagtgcggtctctatctagtcatgtccaataattaactgtaataccaaataccaaatctaccctttcacatactgctaataccaaatctatcctttcacatactgctagtatcaaatctaccctttcacatactgctagtatatactagcagtagaatgtaccgtaaaaagtcctctaataatgttatacaggtggtgattggttgcgacgggtggaactcggtggtggccaggtacgtggggctaggcgcgccgtcgcagctccctcgtttcatcgtcctcggcttcgcgagctacccagaggggcacccgtttgggaccgagttctcgcaaatcatagcggatgattttgccgtcggacgggtgcccattaacgaaaatctgttgcatttcttcgtaagcaggagtccctcaccaggtataattaattaacctatggtttaataatggcattggcaggtaatttaattttaagcattaattaatttataaagtacacatgtgtcctgtaatattttgattcggatttacggttccttgatagtcgacgttttgataaagatgaagtcaaactttttaaaaaatttaactattaataacttttaaaaatatttagtttgatgatactaaagcaaacatatataaatttatcaaacaaagtactgtaataaaaataaaaatttgtttatttatttattgtatattactttctccgtttcacaatgtaagtcatcctaacattttccacattcatattgatgctaatgaatatatatatatatatataatggattcattaacattaatataaatatggaaaatgctataatgtcttacattgtgaaatggagggagtacaatagaaaaatatggtaaaagataggagtaatatcactgtccaaaattaagaattacggagatgagtgactaattaattaactttgtcaagaacgtgtttatcgatccaggacgtacggacgttgatgaggacgcggcgaggaagtacgtgctggagaaggtcgacgagctccccggcgaggtcgccgacatggtgcgtcggtgcgacgcggcgtcgagctggacgctgacgaaggtgtggtaccggccgccgtggcaggtggcgctcgccgggttccggcgcggcgcggtgacggtcgccggcgacgcgatgcacgccatggggcccttcatcggccagggcggctccgcggggctggaggacgccgtcgtgctcgcccgctcgctgtcgtcggcggcggccggcgatggccgggcgccgccgcgtcagcagctgcgcgacgacgccgtcggcgcggcgatagacgagtacgtcgcggagaggcggcggagggcgacgacgctgtgcctgcacagcttcgccatcgggacgttgctgacgacgaggtggctcgccgtgaagctcgcgtgcgtcgccgtcctggcgctcctcggcggcgactcgcgccgtgatgcggactacgactgcggccgcctctagcggaccatccgtttcgtttattcgcgaaacaagtcaaacgatatatttataaactaaaagtaatttgtttttatatacgtgttcttaacgatcaaaaagcaaatgctgaaaataaacttcgatgaagaaatctcaaaaccagctttaaatttaatgttgcaaattcaaaatttaggttacacacaaggaaaaaaaagcactatgacgagaatagcatctataaacacaccttgttaatttagtaattagctcctctgggtggttaatcagtgagtatcatgttgattgttgaggtaggagtgcaacagtgagtatcagtacttattagtatgcaataaatccgatgataatcttgtttcaaaagctgaacaaaaggctgtggacatcactttgatttaggaagtccccgttcccacccccaccccccgcgttgcccacgcgctagcaacacggggggtgaaaaccctagcagcgccgccaccttccctctcccccctcccccacctcatcgccgttggaaagccggcgagcgagctatgatggtggcggcggggcttcctccatggcggcgaccactatcaggcgcgggagaggcggcgaacggcggcggcccatcctggcgaggagacggtggattcggcgctgccttcgccggatctggccatcccttggctcaggggcggaactgggcctagggcagcttgggcccgggccctactcatagcaaaatcgttagtgaattaatacccatatatttctcaaatttttacaaatcctcatggtccagccctactcgtctggcctagccccacatggcctttcccaggccccaggtgtcccagtcttcccagcccagtagacagcccagtagaaaagccaaccctagtccccacctcctcagctcctctcgtcttgctctcggctctccccatcacgcagacgcagcagcgccgccgcatcccgcttgtcctcgattcctcggcatcagcgctgcgcatcggggcggaagggagcggcgcacccgtgccacagcggcgcgaatcgatggaaggaggcagcgcgcataggaggcgtgtctcggcagcggcgcgcgcattggcgtcgagccggcgacgggccgacggcagcgggctagcagcgcttccgtagttcccctttctcatccacctcgcctcaaagcttggttcaccaaatctaggtcaatgtcctctctaatctttgatgttcgatctgcatccaacatccttattcttcttttgatagcaattagtctcaattagaaattggtttgattttttagatgaagaggaatagaactttaaaatcattctaccaagtcccaatccagtgagtccacttcaacccagaaacatgagaaacaatttgtaacttgcatcatttcagcaatgaaatatttaatttggtacttgatgaaattattgttgagttaaacaatcgctttgctgaaaggtctactcggctattaagatgcattgcttgtcttgatccaaggaattcttttaccaattatgatgaagataaggtcattgaacttgctaagatatatgtggctaactttttaaatattattgtatagtgcttagagatcaacttgacacatttagttcaacttgacatatttagtttaatcttgtttttttctatacttttactgtacttcgttgtatgattagaaattgtatttcagtcttgcattttttttcaacttcgttgtatgattagaaattgtatttcagtcttgcattttttttcaacagtgtatgcattgtatggtcctcatggatagttttagcctttaatttgagccctaggcgtgtagagatcctggctccgccactgccttggctagatccggccggagcgtgggagctggcggcggcgacagcgcggcgttggcagcagaggccgccgcggcatggcggggtgcgaggccagcgcggtggcataacaagggtagcggctacgacgcgatgacacgccagcaacggcgtgatgaggcggcggcgacgatgcgatgacacgccggcgacggcgcttgcactgctgctggcggcgcccgccgcggcaaggcggtcggccactgcagaggacggcaaggcgtagtggtgggagcccctggtgcccgacggtggtcggccgttggggacgacggcgacggcgtcggtggcagccgcggcaacacccgtggtggtagcagcagtggttgacggtgcggaggcagagctcgtcgcagcggcgattgcaagcacggagctcgtcgtggcggtcgcgtcagcggctggcaggcgacagcaggtggctggacgacggtagcagcggctgttgtagcgattgtggttgcggtgggaggatgcactgtggtggcgatcgtggctgaggtgggaggaggcatggtgtcctcggacggctagccgagggcgtggaagacggctgcatctggccggcgcggcagcgtttggaggagggtcgaagattggcttggcgcggcagcgtttggaggagggtcgaagattggcttggcgcagagagaagcagctgatggcagcggaggctggctcgacgcgagatggcgcgggcggcggaaatggaggacggcttggcgcgagaggcgcatcaggtggaggaggctagcttggcatgagaagcgcggtcggcggtggaggaggcgacctcggtgcgaggagaagttgccagtgggtgtggcgcggcctacagcacacgaatgctggtcggcagggggcgccggtgcaagggtcccacatgtcgtcagaggttgagtggtggtggagcatcggtgcatcagccgtggattcgcaggtggtgagcggtgggtgaaaacccagcccggccttggccgaactgacaaggatggttaattcctccttctgagggcgttgtcatgctctcacccctaaaggttggttgccgggcgaaagccaagtcttggctcctttgagccccgacggacggtggcggcggttttccgtcgcttctcttcttgaagatttcgttatggcatcccctagctatggggcgatctcgtctgtgttcctttgttggtctagcggcgatcggtcacgcttagcggcggccggtccggtgctagccttctcccggatttgtgtgttggcgctgtcggtgtgtgggtggtggtatattttttccttttttccggattacaaccctccacagggttgtaatcttgtaatttttcctgctcaatcaaaattaactttgcagcgtctcatgctaggcgttcaaaaaaaaaaaacgttgaaggttgaggaggccatcggtgtgagggtgtccagtgttatcccaggagtggcccaaatagctgggccatcagtgtccttgtaggcttcaattcttgtaggccttcctttgttcgtgggcctattttggagtgggctgtagctgtccgtgtagggagtgagtgggcagaaatctgatagtcaagatttggctgaaattcatattcggctcacaattcatggaacatacggagagggatgcttctcactgccatccatacatttctctttgctacttgactgatgaacaaataatttctacttaaatgtttctaatcttaaaaatgaaattgatattttctaaaatcgtaggaattaatggcgattccagttcggttctaccgatatgtacagggagatcgccttataatacttgacgacctcgccgccgtcaattccggacatgcgcggcggcggttcttgcaccggcctcggcctccggtggccgtgccggcgttgccgcctccacggcgcggatggcgacggtgacgctgacaccgtgctcgacgtcgccgtcgtcgttgtctcctccggtggcgcaggagcatgacgacgtcgaccccgccgccccttgccgcccgaagctccagagccttctcagtgacctcagccgcgccaagctcggcgacgacctcgccgccgcgtcgcgcggggtcgtcgaagccgcggattcggggatctcgatcaccagcgtgctgcggccctccgctgtcatggtcaccgcgccggcgccatggtcggacaggccgagcaggacgctcgccgggaggctcacggtgtagctcgccggcggctccggcgggacgggaggaagaggcggcggcggcacgacgacggtgaggcggcagagcgggcaggtggagtgggagccgagccacatgtcgacgcactcggcgtggaagccgtggccgcaccgggggaggaacctggcctcctcgccgtcctcgagctccgcgaggcacaccgcgcactcgacgccgtcgtcgtcctcctcctcctcctccttcgccgccgccgccgccgtgctgcggctgtacaccgtgaccggcagcgaccggagcacctccgggtcgacccctcctcccgttccaccgtccccgccgctcccagagcgccgccgcggccgcggccgccgcccgcgcccgctcgtcgacgtcgtcgtcacggcgcggcgccgctcgtcgcagtagcactggagcaggacgaaggcgagcgtgagcgccgcgaagacgatgagcacggccgccacggtggcgatgccgccggccgtcatggctgcctgccctgcaggcgcggacaccggcgacggcgacgacgacgacgaagactcgtccatggcggggccgccctgctcgacaccccgcaccataataatcgaccgtcacatgcatatgtgaccgcgcgcactcgagctcgcgtcgcatatttatacacacacacacatagcggagtagtaggctagagtggtagatggaatgagacgcggtgagatgcgagcgcaagcagaggcttcctggaagggggatgcgcgcctgcggggcttgggcggcaagtacttgtgttggtgtttgctagcgcgcgcgcattcgtcttcgtcctcgtcttccaaacgagctatcaacgtcgtccgctgttgatgttgatgcaggcaaagtggtgtttgtgcgtgggcaacttccatttggtttgggtaccactactacagaacccaaatagatgtgctggttcataacaaaccggccctaattattaattataagaaccggttacgcgtataaaccggcaccgatatgtgccggttattttaaaaaaacaatatacaccaaccggttctatttattaaaaaaaccagggcaactatattcatccggccgcgcacttcagtacctgtgaatcctcctatatgtgcttgtttatttgaaaaaaatggtacctatagttctaaaacccacacctatactaatagggattggtacctataaattggttccggctgagaaaccgacacctatagtcaactagcaccaatatgaatttctccagcagtgtatggtgagatcgagttaaatcagttttggatcaacggatgcaatgtcctctactcctctcgttcatttgcatatcgtttaaatagtatgaaaagaaataagatatattaatatgtgatatatcattttaggaacatataacttagaaaaatatgattgtgagtacatatatactggttaaagttaggttttgttgttctaaactttaacatgtatgtttgtctagtgggtatatcacatatcaatatatcttgttaatctttttaagaacttttttttaaaaaatgggactatatagtgcatgtgcactaattagggcaaactagttgtcatcctgactaaatgatggaattaacatgtagctattttatttaaagcttaggtggtaggaatatattttctacttatttgctagatgaactagtacaaattagatttttctgaacatcacatttgcagacaacatcaaatgacctgcactaattagattacatatttaatttcaaactactctcttcatccaaaaataagtttattttttacttactccacacataacaatacaaaagctaatcctattcactttatcaaatcctaaatattattgtaattgttttttcactttatctacttccaatatcgtatatatcctctacttttacaaattctagtacaacgattgcttaaagataaactcatttcggaacggatgtggcattatttcgatgatacgcaatatggagcaaaacatccccggctataatccacacttccgatggcaatatgagcagtttttaagtttttcttttggactgattgggaccggaccgccgcgggtaacgaccgaagaagagcagaaaacagcaggtggccgcgcgcatgcagacaaactccagcctccaggttaccaagatgacgcttaaaacacgcacgaggaagccatgcgtgaggcagcaggaacgcccgggcttcgtcgcgagctcgcccagtccagctgccgacacggacatctgcggtcaaaaggacaaattaacttagacacgtgaagtacttcctccatcttaaaatgtatctacctagtactttctctgttttatattataagactttctagcattgctgacattcatatgtatgttaataaatctaacatatatgtgtgtttagattcattaatatctatataaatataggcaatgctagaaaatcttataaactaaaacggaggtagtactagatatgtatctacctagtactacgaatctgaacagcctcctatccaaatttgtattactagataatgtcacatctagtacttagatagttatatcttgagacggaggtagtaataattaaggcaaaatctaaatcaagaggcctctcgttttagtgctaacgagagaccctatttgccttagtactagttcccattaagtaagtagaaaatataatcctatcacctatgtttcaaataaaattttctcttaaactactcatccgatttatgattcgattacacggttgtgttcgtaaaaattaaatctttacaacaagatctcacatgattatattttgatgaaaaactacaaattacttttatggtatatctaaattacttttagatttcactaaattacttcttacacatataaaaataattttagtagagcttaaaagtaatttacatatattatagaagtaacttaagacaaaaaagaaagtaactttgtcatgacattaaaagtagatccgttatggaggtaaaaacgtgagtctatctaaaaattaaatttaatcagcacaaattatagaattgactaaaaaggataatagaataaacaactcacaacattatgattgtataataagtaatttaatcaaatcgaaaagtaatttatatatatatgataaaagtaacttacatatataataaaattaatttacaatatagatatttcttttatcaaaatatagtcatgtaagatcttgttgtaaagatttaattgaaacgaacacaatggtgtaatcggattaaaaatcggataaataatttaaaagaaaaatctataagaagaaaaaaaatgtatcatttggtgtactagtatgcaaccaggtctaagatgagtctctggttaagacaatatagagtgcggtctctatctagtcatgtccaataattaactgtaataccaaataccaaatctaccctttcacatactgctaataccaaatctatcctttcacatactgctagtatcaaatctaccctttcacatactgctagtatatactagcagtagaatgtaccgtaaaaagtcctctaataatgttatacaggtggtgattggttgcgacgggtggaactcggtggtggccaggtacgtggggctaggcgcgccgtcgcagctccctcgtttcatcgtcctcggcttcgcgagctacccagaggggcacccgtttgggaccgagttctcgcaaatcatagcggatgattttgccgtcggacgggtgcccattaacgaaaatctgttgcatttcttcgtaagcaggagtccctcaccaggtataattaattaacctatggtttaataatggcattggcaggtaatttaattttaagcattaattaatttataaagtacacatgtgtcctgtaatattttgattcggatttacggttccttgatagtcgacgttttgataaagatgaagtcaaactttttaaaaaatttaactattaataacttttaaaaatatttagtttgatgatactaaagcaaacatatataaatttatcaaacaaagtactgtaataaaaataaaaatttgtttatttatttattgtatattactttctccgtttcacaatgtaagtcatcctaacattttccacattcatattgatgctaatgaatatatatatatatatatataatggattcattaacattaatataaatatggaaaatgctataatgtcttacattgtgaaatggagggagtacaatagaaaaatatggtaaaagataggagtaatatcactgtccaaaattaagaattacggagatgagtgactaattaattaactttgtcaagaacgtgtttatcgatccaggacgtacggacgttgatgaggacgcggcgaggaagtacgtgctggagaaggtcgacgagctccccggcgaggtcgccgacatggtgcgtcggtgcgacgcggcgtcgagctggacgctgacgaaggtgtggtaccggccgccgtggcaggtggcgctcgccgggttccggcgcggcgcggtgacggtcgccggcgacgcgatgcacgccatggggcccttcatcggccagggcggctccgcggggctggaggacgccgtcgtgctcgcccgctcgctgtcgtcggcggcggccggcgatggccgggcgccgccgcgtcagcagctgcgcgacgacgccgtcggcgcggcgatagacgagtacgtcgcggagaggcggcggagggcgacgacgctgtgcctgcacagcttcgccatcgggacgttgctgacgacgaggtggctcgccgtgaagctcgcgtgcgtcgccgtcctggcgctcctcggcggcgactcgcgccgtgatgcggactacgactgcggccgcctctagcggaccatccgtttcgtttattcgcgaaacaagtcaaacgatatatttataaactaaaagtaatatgttttatatacgtgttcttaacgatcaaaaagcaaatgctgaaaataaacttcgatgaagaaatctcaaaaccagctttaaatttaatgttgcaaattcaaaatttaggttacacacaaggaaaaaaaagcactatgacgagaatagcatctataaacacaccttgttaatttagtaattagctcctctgggtggttaatcagtgagtatcatgttgattgttgaggtaggagtgcaacagtgagtatcagtacttattagtatgcaataaatccgatgataatcttgtttcaaaagctgaacaaaaggctgtggacatcactttgatttaggaagtccccgttcccacccccaccccccgcgttgcccacgcgctagcaacacggggggtgaaaaccctagcagcgccgccaccttccctctcccccctcccccacctcatcgccgttggaaagccggcgagcgagctatgatggtggcggcggggcttcctccatggcggcgaccactatcaggcgcgggagaggcggcgaacggcggcggcccatcctggcgaggagacggtggattcggcgctgccttcgccggatctggccatcccttggctcaggggcggaactgggcctagggcagcttgggcccgggccctactcatagcaaaatcgttagtgaattaatacccatatatttctcaaatttttacaaatcctcatggtccagccctactcgtctggcctagccccacatggcctttcccaggccccaggtgtcccagtcttcccagcccagtagacagcccagtagaaaagccaaccctagtccccacctcctcagctcctctcgtcttgctctcggctctccccatcacgcagacgcagcagcgccgccgcatcccgcttgtcctcgattcctcggcatcagcgctgcgcatcggggcggaagggagcggcgcacccgtgccacagcggcgcgaatcgatggaaggaggcagcgcgcataggaggcgtgtctcggcagcggcgcgcgcattggcgtcgagccggcgacgggccgacggcagcgggctagcagcgcttccgtagttcccctttctcatccacctcgcctcaaagcttggttcaccaaatctaggtcaatgtcctctctaatctttgatgttcgatctgcatccaacatccttattcttcttttgatagcaattagtctcaattagaaattggtttgattttttagatgaagaggaatagaactttaaaatcattctaccaagtcccaatccagtgagtccacttcaacccagaaacatgagaaacaatttgtaacttgcatcatttcagcaatgaaatatttaatttggtacttgatgaaattattgttgagttaaacaatcgctttgctgaaaggtctactcggctattaagatgcattgcttgtcttgatccaaggaattcttttaccaattatgatgaagataaggtcattgaacttgctaagatatatgtggctaactttttaaatattattgtatagtgcttagagatcaacttgacacatttagttcaacttgacatatttagtttaatcttgtttttttctatacttttactgtacttcgttgtatgattagaaattgtatttcagtcttgcattttttttcaacttcgttgtatgattagaaattgtatttcagtcttgcattttttttcaacagtgtatgcattgtatggtcctcatggatagttttagcctttaatttgagccctaggcgtgtagagatcctggctccgccactgccttggctagatccggccggagcgtgggagctggcggcggcgacagcgcggcgttggcagcagaggccgccgcggcatggcggggtgcgaggccagcgcggtggcataacaagggtagcggctacgacgcgatgacacgccagcaacggcgtgatgaggcggcggcgacgatgcgatgacacgccggcgacggcgcttgcactgctgctggcggcgcccgccgcggcaaggcggtcggccactgcagaggacggcaaggcgtagtggtgggagcccctggtgcccgacggtggtcggccgttggggacgacggcgacggcgtcggtggcagccgcggcaacacccgtggtggtagcagcagtggttgacggtgcggaggcagagctcgtcgcagcggcgattgcaagcacggagctcgtcatggcggtcgcgtcagcggctggcaggcgacagcaggtggctggacgacggtagcagcggctgttgtagcgattgtggttgcggtgggaggatgcactgtggtggcgatcgtggctgaggtgggaggaggcatggtgtcctcggacggctagccgagggcgtggaagacggctgcatctggccggcgcggcagcgtttggaggagggtcgaagattggcttggcgcggcagcgtttggaggagggtcgaagattggcttggcgcagagagaagcagctgatggcagcggaggctggctcgacgcgagatggcgcgggcggcggaaatggaggacggcttggcgcgagaggcgcatcaggtggaggaggctagcttggcatgagaagcgcggtcggcggtggaggaggcgacctcggtgcgaggagaagttgccagtgggtgtggcgcggcctacagcacacgaatgctggtcggcagggggcgccggtgcaagggtcccacatgtcgtcagaggttgagtggtggtggagcatcggtgcatcagccgtggattcgcaggtggtgagcggtgggtgaaaacccagcccggccttggccgaactgacaaggatggttaattcctccttctgagggcgttgtcatgctctcacccctaaaggttggttgccgggcgaaagccaagtcttggctcctttgagccccgacggacggtggcggcggttttccgtcgcttctcttcttgaagatttcgttatggcatcccctagctatggggcgatctcgtctgtgttcctttgttggtctagcggcgatcggtcacgcttagcggcggccggtccggtgctagccttctcccggatttgtgtgttggcgctgtcggtgtgtgggtggtggtatattttttccttttttccggattacaaccctccacagggttgtaatcttgtaatttttcctgctcaatcaaaattaactttgcagcgtctcatgctaggcgttcaaaaaaaaaaaacgttgaaggttgaggaggccatcggtgtgagggtgtccagtgttatcccaggagtggcccaaatagctgggccatcagtgtccttgtaggcttcaattcttgtaggccttcctttgttcgtgggcctattttggagtgggctgtagctgtccgtgtagggagtgagtgggcagaaatctgatagtcaagatttggctgaaattcatattcggctcacaattcatggaacatacggagagggatgcttctcactgccatccatacatttctctttgctacttgactgatgaacaaataatttctacttaaatgtttctaatcttaaaaatgaaattgatattttctaaaatcgtaggaattaatggcgattccagttcggttctaccgatatgtacagggagatcgccttataatacttgacgacctcgccgccgtcaattccggacatgcgcggcggcggttcttgcaccggcctcggcctccggtggccgtgccggcgttgccgcctccacggcgcggatggcgacggtgacgctgacaccgtgctcgacgtcgccgtcgtcgttgtctcctccggtggcgcaggagcatgacgacgtcgaccccgccgccccttgccgcccgaagctccagagccttctcagtgacctcagccgcgccaagctcggcgacgacctcgccgccgcgtcgcgcggggtcgtcgaagccgcggattcggggatctcgatcaccagcgtgctgcggccctccgctgtcatggtcaccgcgccggcgccatggtcggacaggccgagcaggacgctcgccgggaggctcacggtgtagctcgccggcggctccggcgggacgggaggaagaggcggcggcggcacgacgacggtgaggcggcagagcgggcaggtggagtgggagccgagccacatgtcgacgcactcggcgtggaagccgtggccgcaccgggggaggaacctggcctcctcgccgtcctcgagctccgcgaggcacaccgcgcactcgacgccgtcgtcgtcctcctcctcctcctccttcgccgccgccgccgccgtgctgcggctgtacaccgtgaccggcagcgaccggagcacctccgggtcgacccctcctcccgttccaccgtccccgccgctcccagagcgccgccgcggccgcggccgccgcccgcgcccgctcgtcgacgtcgtcgtcacggcgcggcgccgctcgtcgcagtagcactggagcaggacgaaggcgagcgtgagcgccgcgaagacgatgagcacggccgccacggtggcgatgccgccggccgtcatggctgcctgccctgcaggcgcggacaccggcgacggcgacgacgacgacgaagactcgtccatggcggggccgccctgctcgacaccccgcaccataataatcgaccgtcacatgcatatgtgaccgcgcgcactcgagctcgcgtcgcatatttatacacacacacacatagcggagtagtaggctagagtggtagatggaatgagacgcggtgagatgcgagcgcaagcagaggcttcctggaagggggatgcgcgcctgcggggcttgggcggcaagtacttgtgttggtgtttgctagcgcgcgcgcattcgtcttcgtcctcgtcttccaaacgagctatcaacgtcgtccgctgttgatgttgatgcaggcaaagtggtgtttgtgcgtgggcaacttccatttggtttgggtaccactactacagaacccaaatagatgtgctggttcataacaaaccggccctaattattaattataagaaccggttacgcgtataaaccggcaccgatatgtgccggttattttaaaaaaacaatatacaccaaccggttctatttattaaaaaaaccagggcaactatattcatccggccgcgcacttcagtacctgtgaatcctcctatatgtgcttgtttatttgaaaaaaatggtacctatagttctaaaacccacacctatactaatagggattggtacctataaattggttccggctgagaaaccgacacctatagtcaactagcaccaatatgaatttctccagcagtgtatggtgagatcgagttaaatcagttttggatcaacggatgcaatgtcctctactcctctcgttcatttgcatatcgtttaaatagtatgaaaagaaataagatatattaatatgtgatatatcattttaggaacatataacttagaaaaatatgattgtgagtacatatatactggttaaagttaggttttgttgttctaaactttaacatgtatgtttgtctagtgggtatatcacatatcaatatatcttgttaatctttttaagaacttttttttaaaaaatgggactatatagtgcatgtgcactaattagggcaaactagttgtcatcctgactaaatgatggaattaacatgtagctattttatttaaagcttaggtggtaggaatatattttctacttatttgctagatgaactagtacaaattagatttttctgaacatcacatttgcagacaacatcaaatgacctgcactaattagattacatatttaatttcaaactactctcttcatccaaaaataagtttattttttacttactccacacataacaatacaaaagctaatcctattcactttatcaaatcctaaatattattgtaattgttttttcactttatctacttccaatatcgtatatatcctctacttttacaaattctagtacaacgattgcttaaagataaactcatttcggaacggatgtggcattatttcgatgatacgcaatatggagcaaaacatccccggctataatccacacttccgatggcaatatgagcagtttttaagtttttcttttggactgattgggaccggaccgccgcgggtaacgaccgaagaagagcagaaaacagcaggtggccgcgcgcatgcagacaaactccagcctccaggttaccaagatgacgcttaaaacacgcacgaggaagccatgcgtgaggcagcaggaacgcccgggcttcgtcgcgagctcgcccagtccagctgccgacacggacatctgcggtcaaaaggacaaattaacttagacacgtgaagtacttcctccatcttaaaatgtatctacctagtactttctctgttttatattataagactttctagcattgctgacattcatatgtatgttaataaatctaacatatatgtgtgtttagattcattaatatctatataaatataggcaatgctagaaaatcttataaactaaaacggaggtagtactagatatgtatctacctagtactacgaatctgaacagcctcctatccaaatttgtattactagataatgtcacatctagtacttagatagttatatcttgagacggaggtagtaataattaaggcaaaatctaaatcaagaggcctctcgttttagtgctaacgagagaccctatttgccttagtactagttcccattaagtaagtagaaaatataatcctatcacctatgtttcaaataaaattttctcttaaactactcatccgatttatgattcgattacacggttgtgttcgtaaaaattaaatctttacaacaagatctcacatgattatattttgatgaaaaactacaaattacttttatggtatatctaaattacttttagatttcactaaattacttcttacacatataaaaataattttagtagagcttaaaagtaatttacatatattatagaagtaacttaagacaaaaaagaaagtaactttgtcatgacattaaaagtagatccgttatggaggtaaaaacgtgagtctatctaaaaattaaatttaatcagcacaaattatagaattgactaaaaaggataatagaataaacaactcacaacattatgattgtataataagtaatttaatcaaatcgaaaagtaatttatatatatatgataaaagtaacttacatatataataaaattaatttacaatatagatatttcttttatcaaaatatagtcatgtaagatcttgttgtaaagatttaattgaaacgaacacaatggtgtaatcggattaaaaatcggataaataatttaaaagaaaaatctataagaagaaaaaaaaatgtatcatttggtgtactagtatgcaaccaggtctaagatgagtctctggttaagacaatatagagtgcggtctctatctagtcatgtccaataattaactgtaacaagcatcattttcctttgccagatgataattaaataaatacatgaaccttataaaagttctatcaagaccacaaatactgtaactgtatcttcactatatataacacacacacacacacaaaaaaaccttaatttggcccggacatgcccgttttggtaggtttagcgacaaataaaaccaaacagagtccataaccttggtcagcagtgccgaaagaaactggattagcgttaattaggaaaagcttttggttttggggtcacgtaagcagcgaagcctaacctgtacatcctctctgtttttaaatatataatgctgttgacatctagacatcatcttattaaaagaatttagtgcaaaatatgcaaataattaagttaaacctaaagtacttttagtgataaaataaattacaatgaaataatttatattgacaagtctttcgaatggttgttaaaaaaaatcaaccacgacatatattatttaaaacgtaagaagcatatcaggttcatgtagcaggggggaaaaacaccaacatgcttactcagatttttgcccattcatcaagtaatacagacaccttcaagttgttgagaaagatattactccctccgtattttattttaatgtatgacgccattgacttttaaccaacgtttgaccactcgtcttattcaaaatttttatacaaatataaaaatacttatatcatgcttaaagaacatttgatgataaatcaagccacaataaaataaattataattacataaattttttgaataagacgaaagatcaaacgcttgtaaaaaagtcaacggcgtcatacattaaaatacggagggaaaaatacggagggagtactaattaagaatctaggatgaagtccaggctttttggacaagtcattgaaattttggatggtgagaattaatcatgctggcttctcgtcctacaccatgcatattctctggaaaaaaaaaagggggaaaataacagaacagcattcaataataccagacatgtcactgttgtggacttaactaataatgtgccacaacgtagcaaatttctcgttgccacgcttgaatcgaccatctttttttgtttcttcagtttgactattatacttttatttttcttacaggcggcttcactaccccatgattggtctgctgtcacaatccgacctcccatctttttaaccctaacactaatctataaactatatttgtttattttattttattttcaaaacatagtatcgacgcaaagcacccatgtatacacgtgcacacactcactcatatagacatggaaaaaagatcttacgaaatgagctacttccactagtatatctaattcataccggtactcgttaggtacttggttggagaaaattctacatcaataaaaagatctgggcattggtaattatgttgtttatagattgtattaaaagtttgcaataaataaaatattatattgcaataacatgtacttcctccgttctcaaataagctaacctcgtactaggatgtgacacatattagtacaacgagtatatgtctagatttattgtattaggatacatcacatcttagtacgaggttgacttatttttgtatggagggagtactctttaggcccattatctactcaagatctgtaaatctgcttgctgatattagatgatttttactgggccgaatttgtagaactggcttttaaacggaataagtctattttcctccctcatctcttactcgattgatttgtctgcctcgaccacaaaaccgggtataacacctcctacatatttgaaaccaatgaaaatcgactccttcgatgatttcagaagcggtttctttaggtgagacccacatgtcaatgagatatgataaaaagatatggcagccccacatgtcaggtcatcaccctccaactcatcaccccaaaggtccccacccccatggctgagccaagaacccacaaccaccccctccctccccatgcggcggtggcaccggaaacatcgtggagtggctgccccagaagctagtgctaccatcgatctgacccggcgtcatcggccccgcttcgcctttcctggcttgaccactacccagcccagatggcactcatcgagtcgcttcacatcttcaagcccaatttggtgagggacggggtcagcccggtgaggcccattgagagagctctcgcgagggcgctagtggagaattacccgctcaccgggaggctgaccgtctccgaggatttctgatgagctacatgtggagtgcgatggcgatgggggtgtagttcaatgaggctgccgttcggtgctggctcaagaacatggattattgggagggtggccgtctctgaggattccacatgttcccccaaaggtttgccactttgtttagggaactatcatcatactccatatcgcactctttaaaactgttacaaagatgtcataaacagtttacaaggtgagtatgcaaatgcccttttattgctcgatattagaaaatcccagaaaaatgtacaaaccatgaaaggctcctcgattgaagctccaagttcctctctacaccaacgaaagatttggttaaaaaagaaaaagaaaacctacaaggtcgcctaaaaaatatgtaaaaaaatatagaggaccatagatcgataacttgctttttcattttgccaccaaaattggcactcccaccaataaaatgcatcagatgcaaatatttcccccaatcaacgtgcctcagaatgtgtgtcaaaaaaccctaatctcaatggggaaatcactccctcaccaaaggggaaccagtccgaaatttgtgcttcccttcgcaatgcctccgcacccgaccgccattgtgaaggaagcacgagcacgcacacaacagagggaaagagagaaggggggggcagggggtaggaggggtgtgccggacatgcatacctgttacccgtggcgagccggcttctgtgagacctttatggtgcttgggaggtacccaggttacctctcaaactattgagtatcaaccgttgattgctaaagggtagatttgggatagaaataatttaatttgcgcaaactgttttaagtcataagaactgtgactttttcctgattgtttgctgctagccccgaattttcttgtctgccattgatatgctcgtcttatacttcactaattcattaatttgcatcttctactgcttaattacaacacaattaatagttattctttacgtatttcattgtcatttgtagcgtatcacatctctgttgcctagcctttcaaaggcatgtttgttctctgttctctccggctgaccatggcggtggctcgcattttataattgatttatcgatgaactctcaagcatcaaagtttaaaatagtagtactccgtattacactacctatcatataaaataataacacagtagtctgtattaggatcctaatacagattacatgtaatctgtaggatcttcatactacgaacaatttttgaaaaagaattgtactacgagcagcttgatggagaagaaccagaactttctttaccgatttgccttatctgatagtagattgatataatttgccaaggataaaattacctaacctcccgcttaatctttaagttaatacctgcccacattttaagtaccttttcagaggtaccatttgatgtaaaccattagattggggtggatcaacgaatgttatggtttcaaagtaccggagaaagtctctctgcacatatacatatagcatggagtagagcgcacgtgactaggcgtggatgcacacaaaacccctcgtcagcttcgattatttgacatcctaactcactttcattcactcagatagtcccatatatcatctttacaagtgttaattaaagcaattgagcaacgaaaaagtgttaaattatcaaattctccacccccaacccagcccatacacactagtgtccagtgttatgccaggccaggagtggcccaaatagctggaggatacacataggcttcaaatcttgtaggcctttctttgtttgcggccctattttggtgggccatgtgtttttctaggctgattcgtccatgtggagagtgagaggacagaattctgataacccagatttggctgaaattcataattggctgacaaatcgtggagcattctgagatggactgatgaacaaatattttctacataaatgtttctaatcttaaaatgaagttgatattttctatgtgatacataaaaaaaaaacagtaggaattaatggtgattccaattgggttctaccaatatgtacagggagatcgccttgaaatacttggtctctggctggacgacctcgccgcggcggttcttgcaccggcctaagcctccggtggccgtgccggcgttgccgcctccacggcgcggatgcctacggtgacgctgatgcggtgctcgacgtcatcgtcgtcgtctcctccggcggcgcaggagcatgacgatgtccagactccagagccttctcagtgacctcagccgcgccaagctcggccacgacctcgccgccgcgtcgcgcggggtcgaagccgcggattcggggatctcgatcaccagcgagctgctgccctccgctgtcatggtcaccgcgccggcgcgccctggtcggacaggccgagcaggacggtctccgggaggttcacggtgtagctcgccggcggctccggcgggacgggaggaagaagaggcggcggcggcacgacgacggtgaggcggcagagcgggcaggtggagtgggagccgagccacatgtcgacgcactcggcgtggaagccgtggccgcaccggcggaggaacctggcctcctcgccgtcctcgagcttcgcgaggcacaccgcgcactccacgccgtcctccttcgccgccgccgccgccgcagcgcggctgtacaccgtgaccggcagcacctccgggtcgacccctcctccccttccaccgtctccgccgctcccagagcgccgccgccgcccacgcccgcttgccgacgtcgtcaaggcgccgcggcgccactcgtcgcagtagcaatggagcaggacgatgagcgtgagcgccgcgaaggtgatgagcacgcccgccacagcggcgatgccgcggaacgtgatggcggtctgccctgcaggcgcggacaccggcgacggtgacaatgacgacgacgacgacgacgacatggcggcgccgccctgctcgacaccccgcaccatactctcgatcgtcactcgtccgggcactcgatcgagctcgcataaacttatatatacactcaatcgaatggcacgcagaggggctttcctggaaggttggaaggggatgcttatacttgtaagatggattaatacgtgataaatcatttcacaattacataagtttaagtttgattcttgtgaaattaataaaaaatagtactccctccatccctaaatatttgatgtcgttgactttttaaaacatgtttgaccgttcgttttattcaaaaacttttgtaaatattattaaaaaactttagtagtagtagtatatttaacaatgaattaaatgataggaaaagaattaataattacttaaattttttgaataagacaaacgattaaacatatttaaaaaaaaatcaatggtgccaaatatttagggacggagggagtatgtctataagcacatgtatactaattaaaggtaaatttgttgtttttattataacttatggaaattgaatttgtgcttacatgtttgcgtcttataatatactagcaaaaatgtccatgcgttgcaacgggtgaaacaattctaatgataatatacgtttttcatgcataaccatatcgatgataatgtttgtatggattgtttgtagataagacaatcagaaaattggaacatcttcaatgtaatgggccaacctcgacgatggcaagcttaccgatgctgctttacctaaaataattggattatttatgtgacaccatgcatataatttaaaatacttttccattgtcattcttgcaaccaataatatgatcaatcaaatcctacaccgccttgcatggtcaagtttacataaaatagagtcattatgcactcttctctaaataacaattaaaatattatttttaaatattatttccatatagtatgttatcaaaaatagtagctatacttaaaaaatagtctgataattaagtctgataatgatatacagaatatgtagggtctttaataacgagaatagatgacgaaacaaaagccgtggagatggaaaaaaaaaagtcgatgaatcatatccgacccaagcgtccatcaatttagcgtttttttacagttttttcagaacggcttgtttttttataaaagattttttttgcttgcgcaatattttcaaaccattttttagaaatagcgcgttttttctgatagttttttcctcgcaagttttttttttgcttttttacatacaatgaaatctttttttctagcgtgttttcttttgctctttttttctgacttctttaaggagtccgaccttttttagattttttatattttttatggtttttttcttttttcttttataggaatcggatttttttattgttttccccattttagggaaaatcagatctacgttttttttctttttcgccacttcttttccccttttataggaatcattttttttgtttttcgccgttttaggaggaattggatctacatcgtgttttttttctttttcgccactttgggaatcgaatatttttttcgctgtttttttttattttgacggacgatggaaacactttttattttttaagtagtagagatagagatagagatagagatataacgtagtatcaatctattttattaaatttgtttgaaactatttataatccacaagcaatgtcactgtcaattttatagtttttctcttggaccgactgggaccagaccgcgcgcacgggtaacaatatgtaaacaacgggtgagcgtgcacatatgcatgccttagagcaagtgctgtaaagactcatgtgttattccctccgtcctataatataaatataagatatcttgagtttttgcttgcaatgtttgatcattcgtcttattaaaaaaattgtgtaaatataaaaaacgaaaagttatgcttaaaatactttggataataaagtaagtcaacaaaaattctaaattttttttaataagacgagtggtcaaacaatataagcaaaaactcaaaatcgcttatattatggaacggagggagtactactaaaaggtggaggagagaaataaacagaaaatattaagcaccgttttatactcaactttacctcgatcacgcgatgtccaccattttctttaccaaggatatatagataaataaatatacacgatccttatagaaatattactaagggtgtgtttgaggatagggaaaagaagattgaggagatgttcactacaattttattttagcattgtcaaaatatttggtaaggtttgagaagtacaaatcatgtttagtttcttacctttgccagagtttagattgctactttgccaaattttggtaaatactaaaatttggtagggttaattttgacagtaaagtgaataacccctaagtagatacataaaacgagataagccattaacgtataaataattaagtattaatcttttaaatcttaagagatagattaatataattttctaaaacaatctttatatagaaaatgtttataaataacatatcgtttagtaggttaggaagtgtgtgtagaaaatgtttataaataacatatcgtttagtaggttaggaagtgtgtgtgaaaaatgagagaattttcctctccttatatgctgctacccaagttggcctatatatgattgcgttcggcacagttatttggccaggctaaacaaataaacatgtgtctcatacatatataaaattttatgtataaaagattttttttaatgttcggattggcctggatgtaccagttttggtcggtttagcaccaaattaaaccaaacagaatccataaccataaactatccataaggtcagctggtcagcagtgccaaaactggatttagcgttagcaaaagccgttggttttggggtcacgtaagagcaaaagcataaccaaggtcttccctccgtttttaaatatctataactaatataaatattcgttttttttcggtcgtcacctcataggtgcggtgtttttttcgtccccctcgcctccccccaaatcccagtcggaattgcattgcccccacccaaaaaaattcccaatcggaattcaatcaatcttcacaatgggaattcaatgaaaccccccgaatcccaattgcactaagaatcggataagggaaacaccttccaaaatcggcacaaccaaatcggatgaacacaccgcaagaaaaattaaaccaatctttgtccccaaaaaaatcatcccacatacatacatcacaaaactacacaccctcggccgtcgccgctgtcggcggatccatccgcggccgccaccgacgctgccactgccgacggatccatcgccgccggatctagggtgggagggaggcgacaggggaggagggagccaccgccggcccgcagccgccgccaccgctgacggacccacctgccgacgccgccgacaccgccatcgccgccggatctggggcaggaaggagtcgagaggtgagaagggagccgccgccgccggatccacccgcggctaccgccgccgccgccaccaccggcggatctaccgcgggagggaggctagagggggtggagggaaccgccgccgacgccgcccctaccctcggatccgccgcaaccgccaccaacccgccgccgccgacccgagagggagaggaggagggggggcgccgccgccgtcgctttgagagaggggatcgggggcgccgctcgccggtcgctgctccgcgccaccgcagccgctctggggaagaagggggggcggcggcgccgccgtcgtcgctcggcgagggggggagggacggggggaggggggaaatgaatcctagggtttgggtatttttatttaggttaggattaatctggactgtccattcgatcggacggctccagctgctcccacgtcgggccgccggcctattgggccaccgaatggaggacgcaaaatagacttcaatggagaaagaaaacaggccagacacatagaatagacaaaagggaggcaatataaactttgctatattcggcccaaacatagaaaggaggattttgatttttttttttccaattaaataatttgttaaatgatttttgtattattaaaaattagcaattaagctctgataattccaataaattccaaagagcgtaactaatcatggagaatttaataaaattaaatttaaccatgtcattttatttttcacacttgctttacttgtaaattgatttaattatacacctacctacttaaaaataccaaatattttaatgaattacataatgtaaattttttttaactttttctcaattttttgttctgtacacttcccgttgcaacgcacgggcacctttgctagtataatattatttatgtttgctcattcactgattatatagccaaatactccctccgtttcaggttataagacgttttgactttagtcaaagtcaaactactttaagtttaactaattttatagaaatttttttttaacccaagacaaatatattataaaaatttattcaattatagatttaacgaaactatactggcgttgtaaatattactactttttttctgcaaagttagtcaaacttagagtagtttgactttgaccaaagtcaaaacgacctataacctgagacgggggagtagcaagtaaaatatacaaaatataaatcatacctaattaaactaactttattgataaaacaagttgcaataaaataatttacatttaacattttttttggtcaaatgtcgtatgtaaaactcaagaacaagcgccacaatttttactcagattttttgcttcttcataaaataatactgacatccagttgttgagaaagacacattaagaatctaggatgaagtgatccagtcttctagcttggacaagtcattggagatttggaatttaggttggtgacaattgttaatcctgctggcttctcgtcctatacacaccaagtctcctgaaagagagagagagagaggaaaataacagaagaacattcaatgataacagacatatatatcactgttcaccactcatcaactgataatgtgccacaacgtagcaaattcctcgttgccacgcttgaattgactctcttttgtcctcattttcttatgtcgttgattattttcaagcatttctaattaagccaataaaaagacacacgtatattaaaaattttgcgctaagatatttgttcgctgataagggctacagcttatatactcttctctctcacaacctgggcggctcactgtcccctgattgtctgctatcacaatcctaattttataccagtactcattatagtttttttttttgcgagagaactcattatagtttggtcctttgggtcaacaaaactcctacaccctcaatctaagtgggtgtttagatttaaggttgtaaagttttgacgtgtcacatcggatactccctttatttcaaattgatctacatatttcataggtataccaagaccaagaaaaactaataactctctcatactatatttactatagcaacaaactcgatgcatgcaccacctccactattttctaaccaatagcaaatcaagatattgcatgtgggttataaatacttgtgtgcatggatgcatgtatcaatgtccatttactcaaatgcacaaataacgaatagacttaatgaatgatcacaaatatgtagatcaattaggagtaacctcaaaaaaaaatatgtagatcaatttagaatggagggagtattatatagggtgtcgcatagggtgttcgggcactaataaaaaataattacaaaatcagtcagtaaaccacgagacaaatttattaagcctaattatccgttattagcaaatgtttactgtagcaccacattgtcaaatcataaaacaattaggcttaaaagattcatcttgcaaattagtcgtaatctgtgcaattagttattttttagcctatatttaatacttcatacaggtatttaaacgttcaatgtgacagggtgaaaaattttgaggtgagatctaaacagggcctaaaaacgaatagcggaatagcttctggctatgaatcttatacataaaataacaatttcataaccaacatttaattattttttttacgaaggggtacataataaaaatgatacagcggccagtagttagtaaatttcactttaggctatatcttattactaatgtttcgttttaaatcatccaataactatttttttattttgaaccaagtaatcttacctttgttgcactttagaccattcaactatcttccggggcatgttggaaaggtcgactcctactcataaataaaatcccacagctatatgtagagcatttcataaacatattacaagttggatgtagatggataaaagagttgaataacctgaagtgccacaaagataaaaaaaaattacccagtttaaagtgaaaacattggttaaatagtggtacaaagtgaaacatcagtaataaaaagtagccaaaatgagatccactctttaacaaaaaaattgattgagggaattaaataattaggatatgtttggggagcttctaacagttgcaacttctcatcacactatatccaattccctaaaaagcccatattttcatccattttatgaaaatctatagtgacataattcaaaaaatgaaccaacttctccagattcttagaacttactccctccgtcccaaaaagactcaattcctgggttttcgtgtcctacgtttgactatccgtcttatatgaaacttttttatgattagtattttcattgttgttaaatgataaaacataaataatactttatacgtgatttatctttttaaattttttcataattttttcaaataagacgaatggtcaaatgttggacacggaaactcaggaattgagttattttagaacggagggagtagctaacaaccagcagattcccagaattttaaactcccctaaacaggtcttggactcaggctatagttgacgcaggaaaatagacttcttccaaccatttatattggtaacatattatttggcccatatggaaaacaggcttttcaagacgacacaaagatgggttttacggcctttttatattggggctacattaggcccacgaccggttaagaagacccaatgttcgtgacgggattaaaaaaggcccagcatggtaaggcccgttcatattcttcccaagcccaaaggtgagcccattactccgcaacccaaattcacgtggaaactagccgcgccaatttgaaaccaaacccaaattgtgaaacccaaaccctcggcgagctcgccggcgatgcggccggcggcgccggcaaggcatccgtccgccgccgcctcctcctcctcctccaccaacagccagcaagagccgcgcccggagaaccccctcctcctcctcccctcctcccgcgccggcaagctctccctcggctgccccgtcctcgaccgcctcctctccggcggcctcccgcccgcctccgtcaccgagatcgccggcgagtccgcctccgggaagacccagctctgcctccagctcgccctcctcgccccgctctccccgctctccgcctcctgcctcttcctccactccgacctccccttccccctccgccgcctccgcggcctcgcccccaaatcccgccccgatctcctcgaccacgtcctcgtcgccgccgcccactccccgtccgacctcatctccctcctctcccgcgcccagcgcctcctcgcccaccccggccgcctaccccccgtccgcctcatcctcgtcgactccatcgcctcccttttccgcgccgacttcgacgcctcgcccgccgacctcaagcgccgctccgcgctcttcttccggatatccgcgaagctgaaggagctggcgcacaggcaccggtgcgtggtggtggtgaccaaccaggtggtggacgtggtggagggggaggccgggaacaccgtggcgtggtcgtcggggcgccgggtgagccccgcgctggggatcgcctgggccaactgcgtcaacacccggctgttcctgacccgggacgcggatggccgcggctgcgcgaggaggcggatgaaggtggcattcgcgccgcacctgccggagcgggcgtgcgagtttgtgatacggagggacggcgtgttcggcgtcgagccgtcgggaaggtaaggagagttctcggtccttttgggcgttcatgtaatggtcgtgatgtgttcgacgaaatgtctgcatggttgattggatctagtagcgtttttacttgaactatgcaattcatgaaatggctggaaaggcatgtaaattaattaacctcattgcaatacaatgtccagctagttaaggttttttggggggcctaggtactcttctgggagaaaaatattttgtctacgtctagaagtctggagacagactactaggttcttgtctacttgtcttattgcatggttggttgaactttcaacggtacttgttatgtactttggtgaaagattaatgttttctgtgtaatttgtcaaaagttaaccataaaaagataataatgagaaagctgatgtttccaaaggttgttattgttgtacagcacacttttgaatcagcaaccatcagaagttgtgaactctctttcaattgtgacattagccgcctaaagtaattaaattactgtgctcatgtgtgattactggtgcgttgtgggtataaaaggtcaaaatatgagatatcatgttaagaatataacaaagattcaaagaaagcatttagttctagatttgctaattgtgtaactttggtagcatgcatgttccatttataaatataccaacattttaatgcaaataaccaatttgcgctgttccatttttttgcattgtgaaaaaaaaatctgcacatgaaacatattttgacaagtttagcattgagttggctaattgagcaaaaatgcactacttgcatatatgaattgaagtggccccattgaccaaactaaaatgtgttgcagctacagatgaacacttatgtgttgctctaatcttatcttgctttcttcaatgatgaactacatactaaaaactaggttacgttcactctaattattcaaatcgggtcaaataattataataatcataattctactaagtttcatcatgcagtttcttcttttgaacctgtcatttgacagtataaattatccttgaattgaggtgctctttatcaagaggatgagctgtactttcattttttttttcaatttgacgagttagctgagtgcttaggcctagtggagcagctttaaggggtaaatattttaaagtagaagacaaagctaatccattattgatgtaaaataatattccagtttgaactggatgcttcactctccattttaatgaatacgcttgataatttttgacgttgtcttgtgattgtgccactatgcgttgctttggtattgtgatgactaaagcattattgcatcacactcacacactcgtgctgtattctgtttctatactcttcctttttttagataatgttctatactcttcctactagagacaaacttcatttgtgtctgacacttcgttattgcctaattctgtatccacataaggatattttacattcattttacctggatcagattgggcaaaatttccccctataatcaatcctttgatttggactggtgaaatgtcctcttcaaacagtccatgaagcaattcaatggaccagtacctcctgtgaccataactcaaggctccagtgccaccgcgtactagggaaggaaccaattgtcctttacctctcttggattctctcaggagggacttctagagttgcactgatgaacacatatttgttgatggatagtttacttcatgtactatgtgtgtcgggttggattgtcgtactggtacatgaagacttggaagaggcccgatgtatcaattttgattgtttgcatctaggttcttcatttgtttctttcttgaacatcctatagtctggtttacaaataggtgtttaacctccctatcgcagaattaatagcacaagcctttcgtctattaatagattcctaatcacgttctgtgttgtgaatctgatatgctatatatctaaagcagagtttgctacaatagtagttctctcagatccctaaattttcttacctgattgttgtaactcttggaaaataatataagatcgatcctagcagtcgattcaccgaactggatagttcattgtcgccattccagaactgaaaaaatatatcagctctatatctatttatagttcaagccttttttagtcagatcaggcataacaatgggttaacagcctaacatgtgcatatggggaccagataatttatacacatttgggcttcttagatttaaatctgttctagtgggacatcgtccatgtttagcctgtaaagaattcccggtacaatgccaggttagccctgtgtttaatttggccttgtgcccctgtcccctctcttccttacaaacacagtaccatgcacagcacatcaaacaacaatccagatgtgaaagctcatagaattgtctacagaacggacaagaaaggctcaaagcaaccaacataagcaatgcatgccatacatatctagaagcataattacaactatgttaggtaagttctctgaaagacacacctctcctgcttatatccagatgagtccagcgagaaacaaccacttgctagtctcctcctaccctcagatcatttgttcataccatttgtaggtgcacctgaattcatgggtgagcagatggacaacgaggagctcaacctaagtttgtcgctccagccatcatatccttcaaggtttcagacagagttttcgtgttgctactgtcctaagaggttccagagctctcaggcattaggtggccaccagaatgcacacaagctccagcgtaaccttgcgaagaggaatcgagaggcttttctatcaataagccaaaggaagggtgcaaatgctggaataaaggatggaagctctgcactctctgctgagtctatctgcaaaatttcaagtggaaagaagcatcataaagaggcctggcaggtgatgcagggatcatgtggttcatcatcatctggtacagtgatgcacaaatctatcgaacaggatgtagaagacgaagatctatcaaatgggacgattgatctgtccttaaagttatgatatgttatttgtttcttatttgcatcatcatctgaatttttgtgggctacttttatgtgtaccatcacctgcaattgtttgggatcatcctatgatgggtatctttatggatccagtagtttcatatacaaggagggtcgttggttagaaaaagtgatctttccttggttccatacttgtagatacattttgaataaactatcccgacctgtagctttgcagaacatttgagttatgtccttgtattgccagttattggtttatgaacatgttcgagtgctctgattaacgtgctgaaaggatcaacgaaatttatgtgcatgttcctagttacaggaactactaactagcatcttgcttcaatctggctgttccatgaaggggtccagatgattccatattccaaaggtaaggcatcatttttatttttttttgtcaaagaacacactcaagactttgcatgtcattacatggcttcttaaggtctaatgatgatctcttcatgttccaattttgactcggaaactcctactatgccctgttatttttttccaagaaatattaaacattccttcagtcatttgaaataacttttctgatctgggaatttaacgcagtacattgtctgatgcacattcttcttgagaaaggcaccattattttcttcactaccagatcaggtaggttttgtagtcaccattgtttctttatcaccagaaaaatgatgcgcatgttaagaatggaattttcgcagtacttgatgagtgcaagatcggagcattcagatgattgttgcagcactctttgcaatcagatcaatttaaaagttgcttgtcttctgtatgcggtcccaaagttgttctgagatgaagtttctcacatattgtatcagaacatggaagcctacatagattgaaactgcagcacctgtggtttctttgacagtaagatgctcttatcctgctataccctttcaggcaagttgtgcttgcagacatggagctactactagtttactagcaccacatgattccatccagattcacatgtctagagtaactattttttgctacatgggcttaaagatttgtggcatgtatgccacctaatttgaacacaaaaggaggtcagttaaagtttcccaatctttcttatctagtgaacttgtttatgcaatagtatcttggtacaattggaatcagtgcactgtcctgaatggcttctcaacatgctatttctgcaccgcatttttttttgtcctagctagattgatttcagcattttctagtaacagtttttcttttatatatatgtctggttttggggcattgaattttatgctctgggtggtctacggtccaaatgcaagaaatgagcttttgctcctgctgatcttccctatcgattttctcgtcaccttctgtgcgaataggtggtgccttttgtctgctttatgggttgtgcttatcagcttgtgtgtaaaagtaaaacatgtctgaggcaactgacggttttcttgtgtattttgcagctgtggcgcgcttggctgtgaactttgtggcaatcgctgcttgacagctttggttcgtgtatctctgcacattactgctactgtatcatttatttttcaccaatcatccatcctgttgttcgcatctctacaaaaagttcagataaaattgcccggctaattatttttattctgattctggagcacattttgaatatgtgcaaagtacagactagaagcggttgtggatttgcagtgactgtatggcagaaattcttaagcaaacatatgccacagtatcttatctgggactggatgaatctatattaccaatagaaatccaggcataggtatgggtgctttctctttagcagatttgcatgtcctcttttggagtgccacttgcgttcgttcccctgggttgggaaccaaccctccgacacggaaaacggagcggtccattagcacgtgattaattaagtatttgctaatttttttaaaaaagtggatcaatataattttttaagcaaattttatataatttttttttaaaaaaaacgtaccgtttagcagtttgaaaagcgtgcgcgcggaaaacgaaggatacgggttgggaaaccttactatcgaacagaagcatgtcccgtggggtggttgcttgggccaacaaatccatatcaccatgtgtcataatgtcaagcatctcaactccccttttaggcgctacacccatcatgtaccaatcaaaactttgtggccttccccatgatagcaacacacatttatcattcatgtcctttgacaaaccaaatttatgttacggatttgctaaacaatactcccttcatcccaaattgataatcatatatgtttatgcgccaagaccacggatgatttgtatcgcatcaatcaaaaacactatgtgcacattctcccaatgcatgcgtcgattaaaacactatgccgattactcccttaacatgcacacattcttccttgctacattaattgtgtttcgataaaatccgtatccatgtggttatatgatgatcaatttgagaaattttggatttttttatatgatgatcaatttggaaaggagaaagtatttgacaaaaatagtaaaaagatctttcaaacttatgaccttcagagtttagaccccctccacaatttgagctcaactacctccctctgaatttgttaagaaaaaaaaactacctccactagctttgatgaactttgcaagtagaggaggtagcattcgaccttggggataaagatagggaagtccattatagcatcagtttgacgatggatagcggtatttaaagctttgattgtttgagctatagtttatagctgataagtcatagaaagaaaccaaaattaatctgtagataaaaacttttatatcgttgttattaatgatttaaaacttattactgaaaaaaatagaatgcaataaaaaatttgaatcttaaaatgaagttaacaagcatatgatataagaggatcatgactaaaaagattcctattctgattgaaatacatattttacctttgtttccgttagcacgtttttcaagctactaaatattttgtttaaaaactttctatattgaagttgctttagaatatcagataaatccatttttcaagcttataataaattagaacttaattaatcacatgctaatagttttttttctaccctaacttcatcgagaattccataggttatatgatctttgtaatctagatttcgaccagatactctaccatgatgtcactgaccgatgccaaaaaaaaaaaaattccaaatcctatcaaccatgccacaatctaaacatcaaatttgctttaaaatcaattgctctgccccccaacacggccagcgtgacatagacacacgggcgctctcgctctcctatctccttctcctcacgagtccacaccaaccaatcgcaaatcacgccgacgtggagcgctaatccccacgcccgcagaagatcccccctgccaccttgactagctacagtccccgctgccacctgtatgcctactacttttgtcaccaacccaatcccctccgagcggtggggccaccaccctcacctggcccacctgtcagccacgtcggggtatccgccagctgtcccccccacgacaggtgggccggcagcggcggggtggcccaccgaccagcgagaggcccatgacgagcggcagtacacgacgacgaggagaaaaataaaaagaaaatatcccatcatatatggtccggaaccttttcccctcgtagccgccatcccattttttttctcctcgccgacccgcgccgtctcgcccgccagtgaccaccgggccccacgtccgtgggacccacatgtcagcgggcgcgcggtgcggtgggctcgcgtagggtgaggtgagcgagggtagcgcgcgacaagtactggtacagtaaacaaaacacaacgaggagtcgtaaacaaagcgctgcacaaggagcgaggcggaggaggaggcgctcactctcgcgcgcgcgcacacactcgcatcgtcgcaccgatcgcggcggcgacggcgcagatctcctccgcggcggcgtctccggcttgcgctggttcgtcgtcgtctctccggctcggtgacgcgcgcgcgggtcgctctctgttgtgctgtgatttttttattttttattttttttggtggtgtgtgtggcgttcattttttttggggattttttttgacctggatttgtggcgcagatctgaggagcggcggcggaggaggaggaggaggagacggagggggagggtagggttagggtttaggggcgatgcagcggcaggggaggagcctgcagaggtcgggctcgaagcgtgtgctcgaccccaccggcggcggcggcggcgacgacgacgaccatgcggccaagcggcctcgcgtgcccgctctcgcaaggtgatactatgatactactataaggtggtggtggtgtgtgatccggtagcagcttttgcttggatgtggtggttgggtaggggttggtgggttaggctgtaggcggctacaattgggagggaattttgggcactttgctttgctccattctccattcggactacggtcggaatgttaaatgctgttgtgaaacctcccatcccaccagcttaacatcaaatagagctgttgaattaagcttaatcctttcattagctcagcaggttaagtgtgtacttggaaccccaactcaaatgattctgtgagaacacatgcactcactaatgggagctaaaagagtgtgtcagcgtactcagggtagtactgtggtccataccgttgggtggggcttggggcttgagtgctcggtttgtgtcactgccccagctgatagcaaaaactttcagctccctgcattcgtgtctctgactcttttgttatgtgatacacgatggcaattttccgatttcgtttgggcacctttaagctccatatgcattaaagtgtcttggcctaacttatttttacaactgatgctaagcactgtatgaggcattggggttgtagatataatttctcccaaaatcaagagaacatagatgtagccatgggttatttgtatcataaaatggcattaacgaactacaattttgttgcattgagccatcttgaagttcaattagtctgtatctgtcatattgctgccatgatctattgttgatctgtcctaatccatttgtttggtatgctgaattagaacttgaaaaatgtgaaatctttatatggtaggagtgagtgcaggctgcctcagaaatgctatgcaaaattttccaaggttaaccatcaacattttgttgaattaaaaggcaatgatctcacaaccatgtaagatactaaaagagtaaatgtaatgattgctgagtggttgggatttggggaaaaaaaactataacagacgctaaattttttttgtgtatatccttgaaattgcaaaaatatgtttgtatcttagttgctcgatttagaggttgctcacttaacaaatgacacatattgcagtgtcattgtggaagctcttaaggtggatagtttgcagaagctttgttcatcactggagccaattcttcgtagagttgtgagtaaaagaactcatagcattggatgttagacatttcttttctatagagatcatacattatttctttgttgatcaatctaattcattatattctggaataggtaagcgaagaggtagagcgtgctttagccaagttgggtcctgccagaattcagggaaggtacaagatcactgtaaaacttgcttgttgtggtgatacttttggatgtgtctatgtgaatttcagttttttctacagttatggtttgagcacaacgaaaaacttaatacaataacattatacctattggaaacaggtcctctccaaaaagaattgaaggacctgatgggagaaatcttcagcttaaatttacaactagattatctctaccactgtttactggtggaaaagtagaaggtgagcagggggcagcaatacatgttgttctgctagatgcgaacactggggttgctgttacttcagggcctgaatcgtgtgcaaaactggatgttcttgtgcttgagggtgacttcaacaacgaggaagatgaggattggacggaagaggagtttgagagtcacattgtcaaggagcgtgaagggaagagacctcttttgacaggtgaccttcaggtgacccttaaagaaggtgttggaaccataggggagcttattttcactgataactccagctggataagaagcagaaaattcaggcttgggctgagggttgccccagggtcttttgaaggtattcgtgttagggaggcgaagacagaagcttttactgttaaggatcacagaggggaatgtatgtttgcaatgagttattgttttactcatactgctagatgatttgaatgttactcgttaaccatatttctattgtatcttgcagtgtacaaaaagcactatccacctgccctaaaggatgatgtttggagattagaaaagattggcaaggatggtgcattccacaagaagttaaatgcaagtgggatttatacagttgaagattttctccagcttcttgtcaaggatcagcagaggttacggagtgtaagttctacaattgttgttaataggttgtaattaatgtagtttaattgatgatcaaatacctcttttttcttttagattcttggcagtggaatgtcaaataagatgtgggaaagccttgttgagcatgcaaagacttgtgtcttaagtggaaagcactatgtatattatgctattgactcaagaaatgtcggtgcaatattcaataacatctatgagttcactggtttgattgctgacgaccagttcatttcagcagaaaatctcactgacaaccagaaggttggcatcttacttatctctttctttgttttaaagttaaaaatgcagtatcttataaatttataattttgaagtgttgtatagctgatttttggcatattaggcatgttgccacatgacactgtaaacttatgttgctgtgctgttggcagtaatgtatcaatgcacaggtctgcgtcctgcatgttcaccttgcattcagagccctatagtaatatacataaatctgtggtgcttcataactagtttttgatatcacgtttccagtggttgccacaatagaatatgcaatttgttataaattatgtgcctcttgaaggaaatgtcttcctgacaccgatatgtttcttttgaattcaactgttgtgtacccaagagctgaaaatataaataccctattgagtgcataacctggctgaactctattgcagatctatgcagatggattggttaagaaagcatatgaggattggatgcatgttgtagaatatgatggcaaggcactcctgagcttcaagcagaaaaagaaatctgtcacaacaagaagtgacacggctgcagcagcaacaaacagccctgtttcctatggttcatccaacacacacaaacaattgtctcaaccagcaaaagcagggcaaacttctacaggcactacaagtgaaggtaatatgatgttcagctcaaaatcccggtacatctatgtatgttgacaatttttatggtggtctctgctgttactatgttccctgttatgtttttgtttagcagctacattttctttgttatgttgggctctatttatcttacctaatgcgagccaagtgatttcggtttgtctttttatccatatgctcgctgacccatccctggaacgtaatgttgctgagctcctacttaatttatttatatggaattatccatctcatctggagtcactctcttgtcttcaaatttcataatcactaattcactgcaatcttcctagtgagaatagaaagatgggtagaaagtggtctatgcaattatgacaagcacatgcagagtagggcagtaggcccattgagaatgctaaaactggaacatgacaaactgtagcagcactggaagatgtgcgtacggccgtacgtcatgactacaaactgctttaactactaccattcaatacttttgttttacttattggaactcagccattgttggttggaattgatgtatgcatttggaaacatgttgatgcttctgatcatgttcaggtcagattatctgtgaacatattattgccattactaatacattgcgctactgaattcctttggtcttttcagcagatggatctacaagtgcatacaatggaaatcaggcaggacgatatgcagtcaattctcaaagcatacctgcaaacgtcactacacaatatgagcggagttcactgacacctgaaagccagttcaatggttccgcactgcagaatcaagtttctaggggctccaatatactggcattgggaccaccacagcaacaacatcagcaaaattttgaattctcagcactaggtggccagtccatgcagcccaccggcttgaatcctttcgatgactggtcgcaaccgcaggagaaccggagtggggttgacgactacctgatggaggagatcaggatgcggagccacgagatattggagaacgaagagatgcaacagatgttgcggattttgagcatgggtggcgcgtcaaccaacctgacggaagacggcttcgcatttcctaactacatgccatcaactccccccaacttcaactttggggatgaccgtgcccgcccacctgggaaagccgtcgtcgggtggctcaagatcaaggcagctatgcgctggggcatctttgtcaggaagaaagctgccgagagaagagctcagcttgttgagctcgaggactagcaaacatcctaactgctggtctaacaaagctccattggtgttgctgctgctgctgttttaaggatctgaaaaatgggcttagcagctcctgtttggaggacgcttccttgaggccctgggttcttaattatggacacggattctcgtctactctttttttgtatagttgtttcatcattgtttgtttagtgtgatgcttagttgaatcctgtacgaaccttaaccagaactgtgtacatttaattgtttcaaaattcacacaagcattcgacactccgtttggttgtagtttagttttgaattataccaatataaaagcaggaaacatataatagaaacaatataaaagaaacacggattcatttttatttttttaaaaagaaggaaacatataatagaaacaatataaaagaaacacgtagtgcagtgggggtttgagttgagggacatatctatctttttccctcggtttcaggcatgtttcagccaacaattcctttacgtaatgccaaagttgcgcataccgtgcattacaggaaaacaaagggtcctgttctatatacagttgtggagaaatgacagtataccatcacaagcaactgaaaaacataccatcacattttatggtgcagttgtagtgccaacgctgacctatgacagcaacaaaaaaaaaacaaaaaaaaaaagtttccaagcatttatgtcttctcacatcgcaaccgcaaaatgctctatacaatctcgacaacaaactcctctctctgacatagtgaactaacacagtgaaggctcatttggctccattctactgtgtcaacagctaaaccatttgggttctgggtaaaattccatgaggtttctcaagctccagttatgaatgatgggaagtaatgctccaaaaccgccaggaaatctctcctgttgttttccatgttgaccggaacgccgagccggccaaccgcctcgaccagttcccccctcagtctctgcggcagcagctgccctcttgcactcgcgcatgcccggtacagcggcaggtacgcgatagcgagtgccatgggctccgggaggtcatgcaggcggatcggagacgcccctctcctcagaaccctggtgatgttcacaaaatgatcttccccagcctctactccttcagcaaatgcggcctgagaccactgctctttcagaaaatcaaccaggtcttggggaatatccatcgtactcgtggtcgcaatgctgtctgcaactgcatacgtagcggcggcatcgttgaggaagtttgaacggagaaggaaggaaacaccttcaaaagacccactaccctgtcccctcgcagctttgagaatctgtgggctgagggcttcgaggacatgccgggggatatgcgcaagcaggtaggtggcaactgcgaagtggccgcaagaggcagcggttgttacagcaaggcacatctcaatgtctgaaacatgccggttgacaaaccactggacaacctgcaagcaaccacgctcagaagcttttactaagggacaaaggaaagatgtggcatgcccttcatccaccaagcatgccatcgtttcaaatttgcagtagtgagaagcatagactagagcaagatcgacatcgacagccaagctgttctgatgagcaatctgcaaaaaataggcaaaagttatatagttgcataccatgcttctacaaaaattcttattcacacatgccaaggactatataataaagcagatagtaagaaagtatattctgctataatataatcagtactgaagagcaaagaacagcacaaccacagatacagcttttttgatagaaacatagatgtcaagatcctacaaaaattcgataatccaacaaatgcatcataatctttttgttcataaaaatccagctaccttccaaaatctagctaaagtcgtaccaaaattgttgccccgatttgattgcttattcttattgaatatctctatgtgcaagcagcgaatgcaagggaggaatcaacaacaaggtacccatattaatgatgccatcatggggtataatagataagagagaagagtcaatgatagtttgacaaactgacagcactagcataacagggcaaagcattgcgttagtagcatatatgagttatgataatgcttattacttcctccattccaaattgatctacatatagtttttttgaggttattcctaaatgatctacatatttgtgtttattcattaggtctattcgttatttgtgcattggagtaaatggacattgatgcatgcatccatgcacataagtatttataacccacatgcaatatcttgatttgctattggctaggaaatagtggggatggtgcatgcatcaagtttgttgctagagtaaatatagtataagagagttattagcttttcttggtcttggtgtacctatgaaatatatagatcaatttggaatggagggagtatgtggcaacgtttcagggacctggggactttccaatgtcatacaaaagaagtaaataactgacccaatatttgcagtggcactataatcatgtctaaatacaatgaacaaaaaatattatctccaactatttgcccatggtaaaagcgcactagtttgaatgctcggatatatttcccactgtaacgagagaccagaattagaaaacactagtgcatagatggatatgttggccacaattgcaaaccaagggcttctagaatagcaaaaataaaatgccactaatgtgctcatttaccgcaatatgaaataaaacagttttaagtcttcagatcaccgaaaacaatacaaacaattgcaattacctttagcagaatgcgtacaagctcagtacttccaaaacgtgaagcttctagaaaacactgatttacattctcagcacctccttccaccagcaatgacaaaagcccttgtatggcaactgctgaactcccagaagaccatccaggttcaaataaagttgagaatagtgtaagtgggaagcaggccgcatcgaatgcctcagtgaaaatcttgccactgagattgtcaccagctatgtccaagaaggctttaaacgctgatagatggaactgtacctcttggtgagtgctgcagtttgctttgtaacactctgtatcttcagaacaacgatgcagatgaatgcactgcaatgcccattctataaacttctgcactttggcacctgcctcaatttgtaaacgttcaccaccaggacaatcttgtagacgatcatgtaatctaaatttgaaaaccaaaagaactaacatcaacaatgatggtaaacagaatatcgtggaagaaacagtatgcaatttgtggttacctctgagctatgatttccttgctatcacctaaagtaagcgccttgctttggcaggcaacgacacaagatgcgagcaatgaagtcctgaggattgccctggcaaaatccttcgcccctgattctacaatcttacctatcagatggttgagaccttgaagatcctgctccgtccgcaagaaccaaatggcatcaagagcaacggacaaaccataatccagcattaactgatggtctgctagagcaacaaggctttcagcgagaccccactgccgcgagaacaaaaccaactgcagcgaatgcccaaaatcaatctgtccatgctcatctatcctctggtttggcatgcaaccatttgattcttcaacagggccattgccatgaacatggctggcactgcattcctggtcatccttgagcacaaggctagcctggccatgctctgcacagtgtgccggagtgccatggcagctaagttcatcagcttctacttcagtgaacactgcattgtccaaaggcatcacctttgcagggatagctagttgcttgccatgctctaccattttctaatttgcttctccaatcaaaccattatattatgtcctagcaagaatattcggatactccctaaagatcaagcagaaaaacaccgatttaacaaccaatctattagcttgaagaatcacttaatccaagatgctaaacagggggacaaaaggatccaaaatttagcgtttactgcacatcacatataaccataaaactaataaacttctagtggaggctggaaatacgaacaaaaagatttcaaggattagagctacagataaatcaaaatccgattgacaagcaatttgtggggggtcaccatatgagatcaaatgttgcatttggtatttggtaagatcatcagaccacacggataccgacgaagcaacagccaaccaagagatgatatccccacaggtacgaaaacttgaaaatttgtatttccagaagagttttaataagaaaacaaactcgaaagaccaactctcaactaggaacccaacctttttaactcagaaaatttacggattcctactcggcctttacaaggggctcttatgaattcaagcaataaataaatatctacctccagatcgaatttcctaataatctcaatatgtggaaactaaattcaatctaaaattcctttaaaagtagaagctcaacctaacaaccctcttaagattttcagatgattaacaagaataaaaaaactcaggactatgcactattggatggatcaagacccttcacctgggcgttccaaaaccgcgcctcaccgcgctcgccgccatcgagacgacgggcggaggcgccggtgccggcgcgacccggggaatcggcggccgggcaggaccgcgggtgaagtggaatcccgggccgccgccgccgccgccgccgcgtggaatcggggaaaggatttggctcggattttgggggagaaacggaggaggagggggaggagggttgggtgggtgcgccgcacgtgcggcgagcggaggaagaagaagacgacgcacgcgagggagaggggggaggggagacgagacgatctccaattctgcagcgagagagagagagagagagatcggacggccctggtcgatttccacgggaatcggacggcggcggtggccaagtgggttgcggagacgcggcagtacattcggatgcgatcgtttctttctgagatgcttatacccaactactacgtccgtcctaaaataaataagtgtagccgtgaatatccgtgtccaacgtttgactgttcatcttatttaaaaaaattatgaatttttttttaaaaaattagtcacacataaagtattattcatgttttattatcatctaataacaacaaaaatactaatcataaaaaaatttcaaataagacgaaacaatcaaatgttggatatgaacagtataaaactacacttattttgggacggatggagtactagtttactcatttcatctttcttctaccaacagagctcctactcccagttaaccaaagaaatttggctgatgaatagatgtatatgatataaatttaaatttctagtatcctttttgttgttaaactatacattgttcaattctattagagaggttgcaaaaattttggtatgcccgagttatagaacaatgtctgttagaatcattttggactcaatattggcctcaatagttcatgtagtacaatgtttatgagttgtttccaagttaatagtcattttagataggtattatcatttataatagatcgtggaataacatacatgcataagcaaaatcatttacaaacaacatgaaaactaatgtggaaattgacatacttatcataattcccaccgaaagaaagaaaaaacaactagcaaaaatgttagtattggcattgtcatcaatatgcttagattagtcttgcagtcccttgctgaactgactttgttggtgggcttgtcatttgaacttcaccaacattcgattcgtcaaccggtgagtcaccaacattttgtgttcttgctgctcttgcattacgccttctagcattttgagcccaattggcaagtccttcgaccacattctcatcaaatattacttttttgaatgaagttcccatcttcaagttggacaaaagaaattagtaccataaaacattaagaaaaatagctagataagtatcgtgtaaaggatatgatgtcattaatatgtgagaagatcacaatttgaaaaggacaatttatatcattgatatagtttattaatgtttcattaccagctttcatgtccatcaagagaaatagtttactttctaggaaaattagttttaacatttaatctactaattgaagaatctaatcatattatcaaaatatgtttcttaaaaaactcacatgagagacaatagcgtagagagggagggtgctatagccgcatagaagttgactgatgacactgaaagcatagaaacaattgtgagttttccaactgaaaaaaaatgattttcctagaacaaaatctaaatatggcaataagtttcatctatacccacaatatgccactctttgtgaggatggcatgtgggcattagcccacctattgataggatatcgatggcatattgtaaacatcaatgaaactaaatgttgtacatcttactaggatagttatttttttttcttaccttatgaccaatcgagcaataacatatcctttatttcccataatgcatgatttgaatccatatgtaacctgaatgtgttgacagatttttagatttcatctcacctcacctcacacacttgataaaaaaaagatagtaggctaaataaacgtaggattcacaaattttataaatttgaatcaaatataaagtatcatgtgatagttttcaaatagctaaaatttgaaattttgaacgagtggaattttgtgcaaattgtattagacatgtaattagcttgcgtactatgctattaatcatgtaaatgtttactattatttaataaaaatagttaatatttttacaagctagcaatggacatctaaggatatgttttatgcatggaattcatttgccaggatatttccctaaaactttgagtcattttatgttgttcttaccagaagccaaaagaaaaatgcaatttcaaatgcattttggaacaagacaatgtggatcaacaagaggactatttttggtcggtggaaccaaaatagctcatctgatggggatactacgagctccccttcaatcgctgtatgtttttcagcaacctgatgggctagctcagtaataatgtgctccaatttagtcccaaccacaagtagcatctgaaaaaaaaacaaatctaatgtttatttttactaaaacaatcctgctttgtaaacatggaaaatcatatgtatgcctataatcaatatttctactaaacataggtagcaacataattcgtaggaatgcttgcatttaatctagggataacataaatgttaatgtgcggatgaattgttataataaatgttgtacttacaacaaatgggactgccgatatccagatatagacataccatcctagacatatccatatgtaacaaaagaatattgtcagttttttcacatagtacaaatatttaaagcataaaagaattgagcaaattacataaagaagcttgactagtgttttacacaaatgtaaaagatcaatggtttgagccatgatagaacaaaagaagatgcccgagtttgaaaagttttgtgtagaaaccacaccttgaacattaagcagcaagaatattatcaacatagcccaaaggtaccaactgcatttaattagcatatatgttaattagtttctacataaaattctatcgaaggattataaataactagtacttgtgtgcaacctaaatctttatccattagttacttacctaatgcctacaactttcttgaaatcatcctccagtgctctaatcatgtatttgtaaaagttgaatttaggattgcccctgcaatgtttctgttatataaaaaaaaattactgatgtaagacaatatgcctaaagaaacaaattagatatcccacttttcaaacgtaaaagttcgaattaccataatgaagccaagccgcatggttacatagtcctcctcagtaaccgacccatagaattgttttaagaacgagcgctatatgatggaaaataaattagtttgttctctatcacaattcacacaataatacatatcaaactatttctaaaaatctacttctaagtttttaatattgtttttgtgaattgtatgttagtgattcatacaccaaaaatttgtattgtatactaagttgtccattaattagtattggcattttaaaaaaaaatcttaccagccaaccaaatgttttccaccttttgccgtgtcctttaaaatgatttttgataaatgggaattcttgcacatgtttgatcatttggggacctgaaagtttcattccaataatccatctgtaagcaaatggtaatggatcgatctttacttgcccaatggagaatgttctttcatcataccattttcatcacttgcttggatcttgttctcccaatgttgccatttccttgtctagatgataatgcacaaaatgtttagcaaaagcatgacacctattaacaaaaagatgtaagaataacttgatttccaatacctgtgcgattcctagaagaactgtaacagcacttagaaccacatgggagaccgctaatacgaagataaatatgtgtaattgatgaatggcttcaactgaaagtattggaactaaaccctgtgtaatatagtaataattagtttcggcaagaaggtaacatgaatgtgcaaaatagatagaagataagcacaacaaaatgcagcatgatagtgtgttactaagatgagaggggagtagcatattgaaatgtgttgtggtttgctttcattttatacaatggaacacgaagtaaaagaagcataactacataaacttggtactccctccttcccaaattgatcattaaaaatacaattcaaaatttctcaaattaatcatcatataaccgcatggatacggatttcatcagaatttaattaatgcaacatgggagaatgtgtgaatgctaagttgtactaattggtaggatgttttaatcgatgcatgcattgtgagagaatgtgtgtatgatgtcttgattgatgtgatttaaattatccttggtcttggtgcataaacatatatatatattatgatcattttgagaaggagggagtactaattaaaaaaaaataacaatatgtatgatggatgcaccatggtacttgttctaagttgtaacaacaatattgtgcacagctcggcgtcctacaaacaatagagtaaaaaaggacacctctagttctcgttccttgtgtttggttaacgaacttgaaacgctggacacgatgtatagatgcaaccctccctcgtttaccgtttacccattcttcatgataatttgttcggatattgtacttgaacgaaaaagaaaaagagaagaaaattttatccattcgctgatttgtgtaagtctcaacagtttcgagttaattaatttgtggcatttctaggaaagcggcatgatgagagtcaaacaaattaaaggcaaatcaaattaaatagtcctaactactactagtacctttttctcgcagtagtcagacttggcccctcctccggcgaggagcctcctcacgccggcggcggccaagtgcgcggtggtcttggccgtcttggcgccgctgaagtcgagcttgcacggctgcaggtggtccatgacgctcgccttcacgcatatcttctgcgtcagcccctggaacacgttcagcagcagcgagatgaaccccagcagcatcagctctgcacatcagccacggttaattttcagtcgatttcatccttaattcgcttgctagacaattcttgttttcttttctcatggagatgatgagattagttttgagctcaccttctttgaccttgaggagtccctcgtagagcggcttcttgcggctcttcttcaacctctgctcagagacggagacagagattatttatagctcgtgtcggatcgatcgccatggcggcattagctcgaacacactagctacgtacgacgaagagcagcgacgtatatataccttgcccaggcggtggagcaggcgctcgaagagcagcgagatgatgacgatgacgaagcagacggcggagacgatccacgtcggtgtgtgctccagcgttatcgccggcgcttcgccgccgcccgccgccgccttccctccccctccggccatggccgccgcgcaatcagcctctcacaggctcaccaacttcttctccttcttcccgcgagaatgtcaaactcaaactgggaagtaaatagtgcacggaggtggaggagaacgtgcacgccgccgcgtagagagtgcggggagagaaatttttatagcggagtgggagattgaccaagcgcgttggcgttggtggaggaagaagaagaagaaggagaagtggactgacgggttaattaggacaaattatagcggggaaatttaattaattaggtgcagcagaagcgatcaaaaactgttgcgacggcaaagagaactttggacacgctccttgtccttggaaccaagtagctgggtcagcagctcagcgtagcagctaaattcatgtgttcaacaaacaaccccccgtctgaattgggaatttcaacaaatggcagcttcatgttttctgggacggagggagtatctttttatgttattttgattttatgacaattattcaacaccgaattcatattaattagattctagtggttttaaacattgactcgatcgaccacacatcacagcaagagtacacatacacatggtcgcccaaaaagaaattaagaagcatctcgagggcttcgtgctacgatccatatatccaccgggacactagctagctaattgcaaaaacgtgggtcaccatctcttcatgaaggtgcagctagctagcgtcctgctaattgtcctttttaataaagcagctagttaaggttgaatgttattggggttggttagagtgtctacggtccttgtttgaattatttttctagtttatcatctctaacatcaccttgttgtgattattattaattattcgctttgtttttgttatcttccttttctgcccatgcatgtgagcattcagaagtcatcgaggactacacagattattactatcaagaaatctaactgaagctgagcttgtaaatatacagtatatgcgtatgtaggagcttatttagcttcgggtgacagcacagatggtgaaatatatttgtttggataatagaagtactatttgtaaaaaaaaacttattatttaagtgtatcctaagtcaaacattatttgaacattaatttatataaactcatatagctagctagcttaacattataagataccataagaaatattttcataatataattcacagctgcacagatttttaaaataatggttgaagataaatatgcttgatttaagttaaatttaggatgataagtaatttaaaatagataaagcataacttttaacttctacaccaattagtggacggagtcacatgtatacacagcaataagccggggcaactgacgaaattaaagtgaaacatgcattttaaattttaatagcaacttggcgcaaaacagataattcaaagtttctaccggattgatcgatggcgcaatcgatcgagttatccatatctttgatcatctaatccatgcatgtgaaatgaattaagaaaaacctataaatggattcacggaccaacccacttgtggaaggagaagaagatattattgggttcaacgattgactaggctagtgaagtctgaagactactagcaaatgaaacggattgcgatcaatcgagctgcctagtaggctaaaactagtatgtactgtaatatctacgcaactagcaccttgttggattcggtttaatttcttgttgattagcgagcggattcgcggaaaatgcacacgcggtggaaggggaaaatgggaatcaaatcaggactatacatcggagacttgttgccccttcctctggaccatatggcagcatgcagcagctacagcatccttaatcgataagaaatcctataatataatttcacactagtaatttggatttgttctatgaaataattgaccgaagatgagccatcatacaagattttctttttattacactagttacatgtttgtacgttaattatgatgggtcatacctaatataaatagctagggatagactggaagcgcgtacattattacagaaaatacccatatagtaagtaggaagggatattggaaggataattgaggacaaaacattagcatattagtggttactttgacgtatggatgcgctgcacacgttggaagcagtggatagaaggaggatgactctattttttctttttacgacagatatttattgtttccaatcataataccataaataatcgaaagtgatacttttctaattcaatctttaaccttttctcatggagcttgtgtcgagattgattatttcttccgttctttccttctcttctccgcttcaacatttaatcacgtgtgacaacttatgactagtgcttagcagttaaatgtatttgtttaaaataagtttaatagtagagacaaccaacacctctaattttattcacacgctacttctgttacacctgcttcaatatactacaacaattttactttatttgtttagtctcaatctactggcttctttcttttcccctgttagagcttgtgtaaatattatctattgtatgaggggtagctcattcgcccttttttccttccttcattcacatcaccatgtgaatctatgctgtactttttaaggtggcactttaagttatgtctgtattctacctcacgactccctcatttcaaaatataagcgtaactaccgctaacataaaaaccaaaaactattattatcatcaacttgtttggatcatcctaataaatataatattatagattagaaatcttagaggtggatagtttaaaataaaattaaggatgtgatgcttaattgcatgctcgtatacgtgtcttgtatatatatactcatttaaaaaaatgaagtggtggtggcggtgaatctaccactttacgtacattcatcgtaaattttgcaagttaccccttgaatctcttaatattaataaatatcaatcctaaattgatagagaaagacgaatatccgtagaaaaaagatgataacatattactccctccttccgtataaaagcatgagcatttagctatgaaatataagaaagtaattgcgccttttagaaaggagagttacttaaaaagctttgttggacgaaagttgcggaggtcaacaaaattggagcaaaatctcatgagcacactgacacacattggttgaccaaattaaccgctataattaagttgctcgagcttggtcaggcaaattaaagcgctctagctactttgtgattatttccggccttatcatttttactgggaagcagtcaatcagtacacctttctccaggcaactggtttcagacttgaaagtttgcattgctagaaagagatcgaccgattctatatctgtattgtcacgttttttccatctctaaactccttattagttaagagatcagcatcgatcaaatcgatcctacaccgcgtctcgacgaaagaaacattacctgcttcgttatggaatcgatcgaagcgtcgccgtcgtcgatcggtcagagcccaggtgctactagcgaagaacacatcgagacaaaaacacacctctgctactcgtcatgcagaacaattcaattgctaaatcagcttaattatttagagcaagtttaatagcataacaaactattaactctaaatcatctataatcaatttaatagccaattcatacaatagttaccataaatatatactccctccgtactcgtaaagaaagtcgtttaggacaatgtttaggtcaaaccttggaatataaatcataaataactctcaagttgtttagtttgaaaatataaaaattatatgaatagatttgtcttgaaaatacttttataaaagtatacatatatcacttttcaataaatatttttatagaaacaagaagtcaaagttgtgttttggagaccgtgtcgctgtcttaaacgacttcctttatgagtacggaggaagtactacactattaatacatggtcctacctgtcatgcacatattacatgaagtccatgctgcagttgactataaatccatagtccgctgcttttcttaaacgacttcctttatgagtacggaggaagtactacactattaatacatggtcctacctgtcatgcacgtattatatggagtccgtgctgcagttgactataaatctatagttcgctgcttttctatcttctcttttatctcctcgaaatgtgtttatgctagctggtttattgtacctgctcttagccacacatcatcggctgtgtgtctgccagcctcatcgtttggcatattttctgaatatgccaaatgacatatttacaaacgaaaatcaatatatgaattaaacttttatatatgtattcttagcaatctaaaagcaaaggctaaaaataaacttcgatgaaaaaacctcaaaatcagctccaaatttaaagttagaaattcaaattttggctgaaaaacatatgaatatgccaaacgatgaggcgctgtgtgtatcaactccagtagcccagttggctgattagtagccctagtagtgatctgttggcttaagtaattaactgacgtaaaggttggatcgagaggtaactgcttcaataatgaggaaaagaaaaatggtttggtgtagcatcgtctgcgaaatcaatgttgtcgtcctcatgcatgcagtgtatatgcatgccttccaccaggtcattaacagtgacatgccagcaggataaataaatcctggtttaattttcataagccaggtgcatattcaaccaatatgtgaacaatctgaatactatctgattaacttagtgcagttcatcaccacatcacttgaccacgttgcaatttattgtttactttggttaaaaaaaacatgatattctggacatcgatgtggcatttaaaatatttgaccattagtttttaaatattctggacatagctacttttcataatattataattcatggggtgatttttgcaaatttccctagtaaaatcaatggtttgtacatttttattgtatataccattgatttgaaaacatagaaaagaatataacattataaaaagtattgttcatagtagattttcacatggtttctatatgtccaaccttaagtagccagatacatcttggttgtagagactagattaatcccactaaaagtatgtccaatcctaatgcctagttcggttcaaaggatttccaaaggattattgtaggaatcgatcgaaaccatatgatttttttctctaagcatcattcgtttcataggaatagctcctaccaaattagtaaggatcgtagtcttagaatcatacgattcttagcatgaggtaaaacctcttgaaaaaattcctatggattgaaaattctttactttttcatattcctatgatttgaaaaatcctttgaaccgaacaagccctaaatatttttaaaaatgaaatatattaagcgataaggtttccggatcagaatgccaaacaaatgaacagtcaagttgaattggtcgtggtctcaaccaccgaggttggcagctacccgattgttgggatcaaacaacctaagctatacagagctacccggtgagggtgcatctatcccataacacctgaaaaaaaacacatttctagtgccctgccagttgcatattgcagcagtataaaattgactcttgactgactaaaaacaggaggaatccataatagccataccagctgctatatgatagtctcatatatactgtgttcttgtttcatatggggaatcagcactagtattctgaagaccagtatggtcagtcatgccccttcaccatttttttttcagagaggaaacagagctgggctgcacatgctgtttgtgccaaaaatgagggagagaatgtgggggttggttgagatgctgtcttccaagttctaactgccacaccaacattggcatagtggattagggaaacatggcaagaaggtgcatgggtaccaaacttccggggtcagagatcagaaattcagaacaaggattcagaaatgcacgtcgttgttagagatcaactagcacgtggtaccaagctacaagagttcgatgtacgtgtaaaccatcaaccgttcggatcggaattattgcgtgttgatgaactgcggaagaagagtattttcggagtagttcagatcagtggtagagccacctcccgagctggtcggttttccgctcaagttccctagttggtgtacgttactgccaattattgtgaacatgatttcagtaaaaagttaatggaaactagaaagggctttttgcagtcttgactcaatggcgccgctagctccactttcggagcagttcgttttacatggttttgattgatgcagtgttacatatgtaaattgggtgtagagcaaaacctatattgctgttgcatatagctcttttgagctagttgtcattagggtttctcttacaaccagttatctaatttcagaatatctttctttgtcgaagggttgcacagataaataaagccccaactgaataggtcaccggtgaaatcattggaatggaattactcgtataggaaaaactacagaaaagtgaggaatcaataagaaaatctattctttcaaaagaacaaaacttgagaagtgcttctatgctcctcaataaaaaaacctgcacaaaaattaaagcacatcaatggtctggattaaaaagcgattaacagggtaaacctcattagcgaggggcaatttcgtcccggaagcaaaagttcatatccatacccaccccgtacccagccgtctctcatcgatcgattcgcgacggcaattccctcgcgacgcacctggaatgatattcagataagatctgcatcatctatgtcaagcggccaaaaggattagcttttgtaaaggacgaaaatcactgaatcaaaaaacaggagaatcgttgggatttctatctaggtttcactaggtacaagaagcgggtattctaccatgcaggagtttgagtcatcatggatggccgccgccgtagaggatgcggccattctccatctggtctgccgcttccacaccacactgcccttcgagaactggtcctatatctcatcatactgtataatctgtctcaacgccgagcgcaacgacgacaagtcgacaatagccctcacagctcgtcgccctcccattcctcgcacatgcccggctgatctggtgatcttcaccatctagccctgttgccgtgtcgacctcccagatcgatggatcgatcggcctgggctggatgtgggctttcacttcctggtcgaaattgccccttggtaatgacggtttaccctagtaatcaccttttgatccgaaccattgatgtgctttaatttccgtgcaggtttttttcaaggagcatagaagcacttctcacaaaactttcattttagtaattgtatagtgttgaagtcacggtgttgttataaatttcagaactactaagtttgaataaaatctaaacgaaaattctaattttagtaaattttatctggtttcctactgtttactgtgataaccattgttaccgggcttactggcataaaactactaggaccattttggaatttggattgataccaaaatgtgtcttaccaatatttttggcaatctaaatagtaaatgtgctagtttggattaaggccaaccaataggtagcacccatgttttatttggctaaattcaagtagtttcttcactacaatatcaaattttggctttatattggtcccaatccaaacatgagctaaataactctactttacccatttattggcagtatcaaagtttgcctagattttagtattattgataaattggtagggtagagatccaaacatgcccgtaaacttggctgctgtctgattaaagtccacgacgaaccatcacggtatgaactatcgcggtcttcttttcttagataatggaatagaatatcccgatctttgctcaacgagctacagccaattattacagagcagcacacaaaataaaaagtttctcacacaaaaaaaagacacctaccaaccgaggataaggagtacacaattattgaattctgtttgtgaatccccatccaaaattggtaaacatttgcataatcgttgcctcaagattacgacatgcaacttttaaacgctcgccctcttcatcacacttttgtagcaatgtccaagacctgagccaatgtgttgccctgaaagttacctgcatatatgaaacagatggtgatttgtcaaaaatcatatcattcctactcaaccatagagcccaacatatagcagaagcttctatgagaataagtttcctatctttcttgtatcgcggtcttcttgaaacagagaaattccatttgcatctctcaactatgggtttttcctactgccgattattgagcttatcatcagggtgcgataatagtaagggcctgataaacttcaccaagcttaaataaatctgaataaaaattttaaatttggtaaaattttgtctggtttttctatcgtttactacggtaccgtggttcaaatgccctaaaaaggggtaatgtagatcctggttgccgtctgataaaagcccattacgaaatacgaactatcttttttagaactcaggaatttgatcttctgaaaaaggaaagaaaaaaaaacccaaatttgatggagtgcagtgcagttcaattctcctgcttccagttgatacaagagccatgggccacagttcaagaggaggtatttgggccacatatattaggtcagcccacgacgaggttaacctacccagcgtgcacacgtgtcacacccccactggccacacatctcccctcatccgctgcgtggtgttccgccgccccggagccgatgcggccggctgattaatttggatgcgatgcgccggcccacgtcggcccatcatctgacgccgacgcgtggacgcatcctgtccatccatcacctccaccgacggctcccagatctcctggtccatgcatccggtccacccaaaagagaagcgacaaaaaggtggaaataaaacgcaataaaataaataaaaccatggagaaaatataaagaaaatcgagagattggtggagagaggaagaacactgggggagaagaacacaagtgtgcagcgtgcgtgtgtggaggcgagaggaggaagacgaaggcgaggagggaggaggtagctgcgcgcgggcgatggaggtggggttcctggggctgggcatcatggggaaggcaatggcggccaacctcctccgccacggcttccgcgtcaccgtctggaaccggactctctccaaggttttctttccatccatccttcctcctccgcagattggtgatgagtttattcgagtaatccgatgtccctgacgcgtgtttgagtgcgcagtgccaggagctcgtcgcgctgggcgccgccgtgggggagacgccggcggccgtcgtcgccaagtgcagatacaccatcgccatgctctccgaccccagcgccgcgctatctgttaagccctagcccctgcttccttagtgtttgcaagatggcgtcctccctgatttttttttgtttttttttgggggctaaattcatctaggttgtattcgacaaggacggcgtgctcgagcagattggggaagggaagggttatgtggacatgtccactgttgatgccgccacttcttgcaagataagcgaggtatacatttctcctccctgatggctttgccttgccctgcccccattatttttatttcaattcatgtatgtatgagtgatgagttattaatcgtgtattagtaattagtttggtggttcttgttgcctccgtgcaatttcttgagtgcgattggccagttacatcttcacaatcctgcaagtttgactgtctgagtaccttacctaatttcacattattagatcctgcaatatatgttgctcgcaagcatattccttgatatcgatgaccctgttagtgtacagtttccatcctggtttgcaaagatattcaactgaacaccaccatgacaatttgtcttgcatccatgtattcctgtgtgtagatatggacctaagaggttggcatttcccttttttttcactatcttgccacatcatgtacgacaataccttctgtagtgctcactcgttttgcttttgtaagttgttctaaaacagacaattattctctactataaatcattgcaaaagcgcagagcttctagccttgtaggcattttcgtgttttcttatgtccttactaatttaatgctgccattctcattaatgagagccattttgtccccttgattgaatggcaacaagttattttgtatacctcatcctagttacactgccaagcacagaatgaattatatcgtaatccgagggaatattccatgaaaacatgtgaatacttaacagaagtggacgatggaggaagagaacatatttttaatcgtttgcagttagaaagaaggaagaataatgacaagccaaatatcatatctatctctttggccgtctgtatgcaattggctaccagggtttgatttatgtcaccaaatatgaacaaattgagccactttcttgctccccagaaaacagtattgcatgaatcataacacagcatggccacttggtgaataatgggctcctgagtatgtgcaaatgaggccatttttaacattcagccttctcatcttggtagagcaaagaagccattcccatacaaaactgtcggcaatatttttaaaatactaccggtgacctcactaagataacatggaacccagtactagactgcatacttgtagttcacaattaataacctaacaagggtcaacatctatcaaggagtattgtagattgtcaggttaatattaaagttcaaactttacatactcaacagctaatttaatttgctaaacattcggcgctttgattttttttatttgtttaaatagtaaggaaagccctactttaaatattggaaatcgttaatgcatcaccgcatatcataagaggtgattttgtttatgaacacaattccattttgtttatgcatgctatttgcttttttttttctgcattaatgcacttgtggtcacagtatgatccaatcttattcaccgatgtataaaaatccaccagtaatagtggcataacattctgaatggtggtcaaccgctcatgtattgtgccttttatgttttgtctgatgactacatgcatggtagtatgagtataacacggcacatttatagatatgccacttcatcatagatttccattcaatcagaacctcacatgattatgacataaggactccagcataccgcacatatgtgaccattgaactagtatgtgcttgtgcagtaagtttgagactaattcagtactgttgacagtatcaactgatcaagtcaacatatttgcatatttctgagttttcaacatcaagcaaacagccaaaagaaagcattagcatcatagcatggaagttcagcacatttttaattccactggattgctgtggtggtgtcttttatttatatttgttttcatcagcatgaccgaattgagtgtgctctataactaccaaggtatgtttataatcgatttcccttaaatacatgtttgcaggctataaaacaaaaaggtggggcttttgttgaagctccagtttcaggaagcaaaaagccagctgaagatggccaattggtcattcttgctgcaggggacaaggtaattccatatgctatgatgattgtttgcaattactactgtaaactagtggtatcggtgacacttcgcaaaaacagtctttctttttctaggtataaatgattgtaccatattttggtcctctgcttgttagtttttggtataagtgatgcatccggttgagttcttttgatgattatggcctaatgatcataaaccttttgtgattatatttacaaaatttatagtgcccataatggcttttagtttatatatgggtctaccactgtggcaattttatcttttttctgcaaacgacaaaatgtgtcggtgtatattattattgttttgcagcatttgcctgaagtccaaagaaatactcagcttatataggctggatttggtttagatgttagcatctaataagtcacgacatggattgatgatccgaatctgatacttaaacctgtcaagtgtcgactatgccagttttcaacaattttaaccagcaagatacaaatcactactgctttagtgctatgtcatagatctgttccgcatttgatgtaattatactgctgctacaggtattgtatgatgatatggtccctgcatttgatgtacttgggaaaaagtcgttctttttgggagagattggaaatggagcaaagatgaaactggtggtcaacatgatcatgggaaggtgactatctattaattatttataaacatctgctgcagtatgatgaatgcaagctccctattgttagcacatgcacatatctcctgtatctttctggactgtcattcatttactgccgttttttcctctcataaaatacaagtaatgttgtttcttactgcagtatgatgaatgctttgtctgagggactctctctggctgataacagtggtttgagcccccagacacttcttgatgtcctggtatggcacatggttaatttcattctaccggagccacctccttcacaattgagcatcaaataacaccgagtaaatcattgtctttcaggaccttggcgccatcgcgaatccaatgttcaagctgaaagggccctcgatgctgcaaggcagctacaaccctgcatttcccctgaaacaccagcagaaggatatgaggttggcacttgccctaggagacgagaacgctgtctccatgccagtggcagctgcttccaacgaggtgcgacgcctttcttcccccttttcaccgcaacctgtgaaagctgaaaacacagcaactgattgcttgaactcatcactgtggtttgctgaatcgcaggcgttcaagaaagcaagaagcttgggactaggggacctggatttctcagcggtttacgaggtactgaagggcgcaggtggctcaggcaaggcgtgaaactctgaacgctagaatccattcttcagaatctgcccattgccgtgcaggtttgctacagtgatcggcatcgaaccacgcagcatatgtcatcgtattgatactactgggtaaccagtgtgaacgatgtagttgcaggttaagtactacagcttgcgtgaacttcatcccaataataaagatatatatagctctgttatgcgatgcaactgtgtagtcacccaggttaagtacgttttttagtgctccgcagtaaggttgatgtttttttttatgctggaagtaaaaggacggacacagtaaaatgtttacgtccacccgtaacgcaggattgacaaaaactcattaacagaaaaaaatacaaatatttggtatgaatatatatgatcacagaattgtaaaacacacacaaaaattaatttgtagattgacgattgccattaattaatgaattaggtgaaattaatgaatatatatttcaaaaccgaggtagtagaaaacttttataaaaaaaaatgcatcgtttaagagcttgagaggcgtgtttgtgacgagccatcatagtaaggtggtgtttgtatctagggatttaactttagtctctatatttagacactaatttagagtattaaatatagactacttacaaaactaattacataaatgaaagctaatttgcgagacaaattttttaagcttatttaatccataattagagaatgtttatgtaacatcatatagactaatcatggattaattaggctcaatagattcgtctcatgaattagtccaagattatggatgggttttattaatagtctacgtttaatatttataattaatgtccaaacatccgatgtgacaagtacttaaaagttttagtcccatataaacagggtctaagagaaaaagagcttgacgattgccattaattaattgctagtgcactccgatgcagattgtatggtattccttccatccaaaagtgctatttaagcttagctacttctcatttttcgttaacatgtttttcaggctactaaacgatttgttatatatatatatatatatatatatatatatatataaggtactttaaaaattcaaataaatattttttaattttttaaatatttaatactcaactaataatatgttaatcatatttcttgatatttctcttttccgtccagctaattagctaaaatctttcatcgtgtgccctatcggtgatatgggcccgggggtacatagcttagagggaagaggccgcccccagcgacagtcatcacgtggccgccacgcgtatgaggttagcatttaatgcggacggagcgagcgcaccacgtcacattaaatgcggcgtgctgtgtgcctgcgatcggtctatgaccggccaaatgacagatgagacggcggcaatgcactcacaccctgatcgtgtgtcaggcggcgtgtggaaggtattgcccgtcccatcataatgatgagaggctttggacctctcgaccagtctggagtcggcttgactgctccagacatgcccgagattgtgttcctggtgcatgcatgccccccaagtcctcctccattaaatggtgagtggcaggggcatcccccgtgtcagccggtatgatttgataagccccgcacagcagccgacgtgcagatgacttccgggttaaggcacaagacacatatttaatgtagagaatattttccctcttccctaaatagacctttgggcccatctaataaccccttgaggtataaaaggaggtacatgtctagcgagaaggggggatctagagtcgaaggcttagctctagcttgtacaccagagattcagagactttataagctcagaaaaatcatcatacacaggagtagggtattacgctccttagtggcccgaatctgtataaaccctttttgtctcatcttcatcgagggccctgaccccctcgacatcgccgtatacttccatccttccaactcctcaactttcactcgcggcctccggccgaactaacaaaggggggcctcacagtcccctgctcgagaagttcaccctcttacacacccttacgcgtattattttttatcaccaagacaaagaaaagttaattcaaactgtattaatttaatcttgctctaaagcagagtattaaaatggatactcggatatcggtcgacaatttaatcttgctataaaaaaaagagataatatcttcatttaaatcttggatacatgatgtggtcgtaccgacggtccgacgtggtagtggctggtccaatagtacgaccacaaggctcaaggtggtcaaggcggtctccggccgttcttccaaaagagtcaagcaaaaactagacctactctacgtcatactatcataagacacgtacgcttattatatggctatgcgacgcaccgccggcaccggtgctcacggcagcggcgaccgcgtgcgcgaccgcgtctctctcggttaacgccacgccatatataaaaaaatgtttcttagtcaagtcaatgaataatgtatcaaactggagtatcgaactgctactacgtacaactagcttaatttaggccgaagacaacgattaagtaaaatcacgtaaaataaaatagcaatcaatacataattgtccgagtttttttttcctggaattactgccagtttgcccagcagtgtaatttttatttattaagaaaaatatttataaaaggttataagaaaagatataaagtttgtaaccaatcatctacaaactgcttgagtgatcatttattctgcaaagatgcagaagaacttcattcaaaaaagagacttccacgactgaaaagatggttgggtatctcagacatggttgtccgagtttttataacacaaatttaatttatacagaacatatcatttagcaattttaaaaaatatatcttactcgaaagggcctgtaacctagtgtagcatataaggtcctgggttcgggcgttatactttcagtggtaggtggcgtatctgtcgacagcaaggcgttatgctttcagtggtagttgacgtaaccgtcgacagcgagacgcctgtggtgacttcgtcaatctcaaggatttaccagcccagtctttaaagatgctcataggggtacgatttacgtgcgtgcatgcgtttatagggatgacattctgttgcgttgttctgtgaaaaaaaaaagagtaacttaaaaaaagagcaagcctgagctgaggttttctttcaaagcgtcttactgtcccatctaccggggcgtcctgtacgatgggctatgccatccatctcggcctagtagctactcctatcttttctgaacgttttctttatgtgtgtctccatgtcctcggcaccaacaccataggcatctacgatccccttcgtctaaaaataaactatttctaattatttaaatattattttacaatacaattatttcttcacctactcccacgtctcaaaccattcatatatctattctccatttaatttttctatcagttttatttttctcaaccaattacaatctcttcttcatattttataatgcgtccttgaagtttcgttttgggctaagtttagtccttgaggtttcaaaacgtccaaacaagtcctctaaattaattatttggattaacatagtccttggacccacaaaaaataccacataagcatgccaagtcattcttgcatgcaacaatacaaatgaaatgaccattctacccttaccatataaaaaaaagaaaagaaaaaaataaaggaaaaaaaaggaaacaacagggaggaacgaacaaaaaggccggaccattactctatctgttgtttcctttttttcttttctttcttttttatatggtaagggtagaatggtcattgttgtatgcaagaatgacttggcatgtttatgtggcattttttttttcaagtactatgttaacccaaatgattaatttggaggacctatttggacgttttgaaacctcaaggactaaactgagcccgaagcgaaacttcagggaccacattagctattctcccttctttttttttagtaatgtccattttcagttttagaatttatttaatattttgaaacggattatacccttgcacgatatatatgtagtacttattacctgttagagaatgcaggatacatgtataacgcagtagtgcgtgctggcaatgatgctcttcgagtcaagtccatggtgatatattagtactagaagacatctctttgaagtctcgaggatcttgactctccgtttcgctgtcattgacctgtttccgtgaatgatggggcaattgggcatctttgcctccatacgtgaaggcatgcatttgtttctcttcgtccttcaaggctcagatttatatttatttttatgcccgcaagaaataaaaagattcagtttttatcttgtgacaaagataatactcccttcgtttcgaaatgtttgacgccgttgactttttagcatacgtttgaccgttcgtcttattcaaaaaatttaagtaattattaattcttttcctatcatttaattcattgttaaatatatttttatgtaggcatataactttacatatttcacaaaagtttttgaataagacgaacggttaaacatgtgctaaaaagtcaacggtgtcaaacattttgaaacggagggagtagctagcacaaccgattgtctatggttctatatgcactcagattcaaatgtggtctttagaagtgtggagattatgggtaccccatatccacacggcatggttatccgactagtaataggggataacatatatgtatggaatatgtaacagatcatgacttgggtattacgtttccttgtatattatggaacggcctaaagtcctggtttgataatattgtaaagtagatttaggaaaccgataccgtgttggttaaggtttctatcttgtaatcctgccccccatcctatataaggtgggcaggaagccctctagggggcatgagacaacctgatcgtcagatctatactacacccggcggattcaaatccccaaacaggagtagggtattacctctcattgagagggcctgaacctgtctaaatcctttgtatccgcatccatccacttttaggtctcgtgcgctacccccttttattattgccgaattcatgtttcgacagttggcgcgccaggtagaggtaaacgccgagtttcctgacgacgagtgcgatggaatcaactttatgagtcgccggcttcgtcttcgctttgggagctccttgattcctcgccgccgacgacttcaacaagacgaatcgtcgctgctattctctgcctgatcttgttcgcatcagcacgacggcaacgacggggcaacgacagttcgacggatttgatggtcgtcctcgtccaccaccaagcctactggtccaatctacccaacgaggatgccatggtgttgcaagatggatctacaaacacgaagcatgccaaaaccgatctaatcggatgcataggagacggctgcagccacgccgatgccttcctgccgtcctgcgtcatgctgatggacaccaacgccgcccgcgactgcgacctccgcctcctccgctccgtctcggagtcagtcgaagagatcaatctcggcgagttttttccttttaatctccgacttcgccgggtttttttccttttcaacttattgttgtttattagattgatctctaaatgtcagattaatctctcttggtattttctgctgtttgcatgtaacgccgcggcactactcttgccgactggtgtttccgtctgcatggctggcctattggtgcccccgcctatacggtcggttggtcacaccaccgttgatgggcatcgtcatcttcaccgccggcctgcctccgtcgccgccgagtggtgcctccgcctacacggctggcctattatgccgccgctgttgggcgtctacgacttcaccgccggcctgcctccgtcgccgccgattggtgcctccgcctacacggctggcctattatgccgccgctgttgggcgtctacgacttcaccgccggcctgcctccgtcgccgccgagtggtgcctccgcctacacggctggcctattatgccgccgctgttgggcgtctacgacttcaccgccggcctgcctccgtcgccgccgattggtgcctccgcctacacggctggcctattatgccgccgctgttgggcgtctacgacttcaccgccggcctgcctccgtcgccgccgattggtgcctccgcctacacggctggcctattatgccgccgctgttgggcgtctacgacttcaccgccggcctgcctccgtcgccgccgagtggtgcctccgcctacacggctggcctattatgccgccgctgttgggcgtctacgacttcaccgccggcttgcctccgtcgccgccgactggtgtcctcgcctatacagttggttggtcacaccaccgttcatgggtgtccacgtcttcgccgaccggctggccttcgccgccgccgactggtgtttctgcctacacggctggcctattatgccgccgctgttgggcgtctacgacttcaccgccggcctgcctccgtcgccgccgactggtgtcttcgcctatatggttgattggtcactccgccgctgttaatgggcttcatcatctacaccactggcttggttccactggcgccgactgatgtttttgtcaccattgatggactgcttcgttcccacatcggctacttttgctgtcaccgagggaatattacaaagctaagtcatcatttgttttattctttatatgatattttgccttttcctctgcctcactacaccaattggtcttccattgagtagtgagtcgggggctacagatgttatatcatattttttaaacaattttcataatatttatcttgattgcttgcgacatattctgagtacaaaagtgcctatcgagttatggagttccatcttcctatgctttccgtttggtttgccaatggatagttgcctttaggccgattcctagcacccgggggctcgttggatggaccgagtaacgcaaggtgctaagtattattcggaataaatcaaaagcatagagataagataatttattttctgctcttaataattgcaaaagtacccgagtagtaaactccgatccgtgaaactttgttccattaatgacgaactcatgtcactcatatgcatgtttgggaagtgcttaggccgactcccagtgcttggtggctatgactagtcgggcagagtgtttaaacgtaatgagtcatctgctcggggaaatcaaaattaacaagagaagaaatacgtatttataaactgcttgattttttctcgagtattatatttatatcagatactactcatcctatatgtttgttctgcaggatccagatccagatatgcataaaagggattcatggctttaagcttatctcttacgctccaggaatggatcagtcagaacatcaccaccggctcgcctcgaccgccgccgactggtgtttccgcctgcacggctggcctattatgccgccattgttgggcgtctacgtcttcaccgaccggcttgctttcgccgccgccgactggtgtttccgcctgcacggctggcctattatgccgccgtcacggctggcctattatgccgccgttgttgggcgtctacgtcttcaccgaccggcttgccttcgccgccgccgactggtgtttccgcctgcacggctggcctttatgccgccgttgttgggcgtctacgtcttcaccgaccggcttgccttcgccgccgccgactggtgtttccgcctgcacggctggcctattatgccgtcgttgttgggcgtctacgtcttcaccgaccggcttgccttcgccactgccgactggtgtttccgcctgcacggctggcctttatgccgccgttgttgggcgtctacgtcttcatcgaccggcttgccttcgccgctgccgactggtgtttccgcctgcacggctgacctttatgccgccgttgttgggcgtctacgtcttcaccgaccggccgcctcgtccgccgccgactggtgcttccgcctgcacggctgacttattatgccgccgttgttgggcgtctacgtcttcaccgaccggccgcctcgaccgccgccgactggtgtttccgcctgcacggctggcctattatgctgccgttgttgggcgtctacgtcttcaccgaccggccgccgcatccgccgctgactggtgtcaccgcctgcacggctggcctgttataacgccaactgatgctatcttcttcacggctggctacatcgctgtcactactaataggcatcagtatcttcaacacaagctgcctacgtttgccatggctgccgactggtttcttcacttccatggctgcatgattctgccagtgttgattggccttaccatcttcatcgccggtcgtctcgtctgctgctgactagtgccctcgcctctacatctggtttatacagctaccactactgatggacatcatcgtcttccgtcgccgactggttatgccgccgccgactggtgctttcatcttcacaactgcgcgtcttcactaccagtttgcttctgttgccgccgactcgtgttcacttcatcacggcgatgcaactttgtcatcatggtagagcgacttcatatttattatcttcggcaccggcaaactctattgctgctgcttcgcaagttttgctacttcaccaaccacgacgtctttgtgaacctcgacatctcggcatgcgatgccgtgttattttactacaacaagtggctctccaatattcaggatttctacttggacatcttcaacacatatcttcaatcaagtgatgactactcgacaacaagaagctataattctcgactctatgttcagttgtttcccaactaatcaaagagtcgggggctacacaaatacatggctcaaaatttgacaagctttatgtcaagatgaagcaatcaattaatcagccaacaagtcaactctgggagtcatcaattttgtcttcgcttcagagcagtaggtcaagattaaatttacatgtctgggagtttggagtcatcaaccaatcaactcatatcagattcaatgagttgaacaacagcatatactttcctccaagtgaagcatctacaacagtttgatggattattgtcactgacatcgtcaccagcacatctgcttcatcggctctgacattccgccgttgctaatggatgactaagacttcgccaacttgctattccgccttcacggttgacctactatgcaaacgcagatgagcgtcttcgtcattatcatcggctattacaccgctattgactggatcaccgacatcgtcatcttcatcaacatcctgtcaaacctctttatcatagcttactctactgctattgataggcaacttcgtcatcatatttgatcatctctgttgatgcttatcatcattactgtcggttacgtttgtcgtcgccgactatcttcctcatcttcatgattggtggatttcgtcatcgcctttgatctgcctcgtctgtcaccgattgattatttcgctgccatggctacataactttatcgctgggcaccttcatcttcattgatggctgacctgactgttgccgactggtttcttcgcctccacggctgtgcaacttcatcacttttgattggtatcattatcttcactaccaccaatatttttgccacctctggtgggcaatattatctctatgttggtcgtcttgtctctatgccaactgcgtcagctaccatcaatggacaattgtgactacgacagaaggacaagctatatgctcaggggcttattagctcaaacacaagtatcataccttcaatttggacttgctctggatatatgcaatatgaattcgtgatcatgggtctattttctatgctcaaagactggactatttattattccccgtaagggttatcaactgaatacttgcgccagtcgggattcaattgttacatctattttggagtatctcataagggataaccactcagatcagaagctcttcatatgagctacatttggtctatattacccggaagatttattactcgggagcatgttacatgcgtcatcctttaaagggtgtcgaaggcatattttttggcctaggcctaatatgtctgcagcccatattttcaggtgtggcctgtcacgttcttttagggacttaggcacttttcgcttaggccaaagtgcgcgtgatcaagtgcccaataccttaaaatccttttataccgcagttactcgactttttaggagttggtacaatgcatcttaaaaggtgtcaaacagtaaagctttatatagctgccccgctgactttttttatatagtcaatgtgctgtttgggtttatcaagcaattgattggatacaatatcattgctttttgccacgtaagtgtgcatttttattgaccaatattatggcttaggctgattatatattatggtcatttttccaggcggttggtaaatcctttatgagtttatttactcggattttataccacatatgccatatatttccaggtgtggtggaaccatgtgtcttctagggacttaagcacatctgttaaagcagtgtgcgcatggcgtatgcccaatactttggaaatttctttattcacaacatacaagcttctttatagctgttttgctatgtgaactttcaaagatgttgtcaactttaggttgtacgcatcatattttgccaagcagtcggtatatcacttggatcatattattcggggattcacaccgcatatgctatatattgatatcaagtcacttggttgattacaattatcaaaaccactcggttggttagattatttattccttgactatatgtttggttggttcaattaaccacatagtcgggggctacacctattaggtgcatctattcgatgcacctgactttatttttcagccctccacagtcttcagatttggtaaaagtactcgggagaccatggcgaagataattgaagcactcggctttggagtaatctagttcgagagaagattatattttcgactgtgaaggtctcaggggctactgtggagattatgggtaccccatatccacacggcatggttatccgactagtaataggggataacatatatgtatggaatatgtaacagatcatgacttgggtattacgtttccttgtatattatggaacggcctaaagtcctggtttgataatattgtaaagtagatttaggaaaccgataccgtgttggttaaggtttctatcttgtaatcctgccccccatcctatataaggtgggcaggaagccctctagggggcatgagacaacctgatcgtcagatctatactacacccggcggattcaaatccccaaacaggagtagggtattacctctcattgagagggcctgaacctgtctaaatcctttgtctccgcatccatccacttttaggtctcgtgcgctacccccttttattattgccgaattcatgtttcgacaagaagaattttttttaggggaattttttttgtggggtgtctttggaagaattaaatgcgtgtagtttttgctacttcatcctttccaaattaatcatcatataacggaatttaaaatttctcaaattgatcatcatataaccgtatggacacggatttctttataatacaattaatgcagtatgagaaaatgtgtgcatgctaaggtgtaattggcatggtgttttaatcgatatatgcgttatgggagaatgtgtatatgatgtcttaattgatgtgatttaaattattcttggtcttggtgtataaacttatatgatgatcagtttgggaaggagggagtagtagtcactgagacactacttgcaagattatgtgtaaaaggtggaaccggtgaagattaattggggttgaattctagtgggtaaaatcatacacttgtacgcataatgcatatatacccttgtcaagtcgtgatttctttagataggtttcgtcttcaccacgtgtaagagggtgtttaaaatagatcgtataagagggtgtttaaaattgagggcgatctccattgattctagactagctgcatatgacaaaaatcaatataatgacgaccgctctctttctgtcagtgtgtttttcgcagtgccatgtttcctattcaaaatagtgtcaaatcacattacctattatttgactagaaaatctttagaattgcaatttataattccatgtgagttttctatgccaatagaattcgatctgtttacaaaaacttcttacatgtacaaaatattgttccatccattaaaaggtctaacaaaaaaaattttgtctataattaaccatgttataactcatatgctacacgtctatcatgacgaggccggcacactacactttctgctgccactggcaacttcatcgaaaaattaaatggataaacggtaggacaacttcatgtattgagaagaaattgctagatatttttgtaaaataaaattgctagatgagattaatattgatactataatcaattactttgcctgtaggaatatctgaagaaaatcttaagacaacatttataatgttttacataataaatattgcttttgcttttggatgcatttcaaatgtttagttattatctagtagaagatataatattaaggacctccatttgtttagttcgccctgaccaccgaaacatcaggaccagccctctgagcatgtacacgctagtattctcatccctgcgagctagaacaaattaacattggaattgcatatgacacctcgtggcttttgggatatatatgtaatgcatgaccacctaatttgtctattttaaatgacaccatgcatatataacagtgacggagccagcgggcatcatcaagctaggtgactaaggacgtttcttggtggtgaccactttttttcaactagcaaatgtcagcggagacgtaagatatttagtgccttacgtgtaattctgaccgttggggttatatcttaatggatggagtatgctagtttacatatgtcatctttgtttttcctttaaatttaacacgtgtaagataatagataatgtcagatctagcttgacccaaagtttagaggggtctgccagcaagaaatagatgaattatgcaatttgaaatgggccttcgatgtccatctaaccaaatatatgataaatatatgacgcgactctttttttctacgagaagcaaacacgaaaagagggatgggattcatgctcatgttaggctagggtgtgttcaatatttatccttttctaacttctactcgacgtttttcgcgtgtattttttcaaactggtatatttttaataatttatttttaaaatttatattttttaactaatacttaattaattatatgttaatattgttttctgtatgtgaaggagaagttaccactccttccgaaatccgagcgcacccgtttctaaatgatgaatgggttagcttctagaaggttagacacgttcaagtgccagacaccggagacacgccttttgccccctccgcatcatctcgaaattcgcagccgccaaaaccaaatccggccctcctcgatctcgatcggaaatatcggattgattgcatgaattgattccttactagtaatactcgatcgatcggttttgtattttcaaaaaggcgcaaacacaaaaggtgatcgatactccataatatgcgatcaaaaagtgaacaactttcgagcaacacattggttttgtactcctctgctctgctgatatttttgtactagatctgttgctgctgccgacctctctctagctttgagagagaggatgctagctaagattgcacttaagtatagtgacggatcaaaaaaattttaagcctaagaaaatatatgtgcttataactgtagacgttattaaacactgaaaatatctgcaagtatatataaagcctgttcaaattatagctaaaataaatcttaccaagttttaccatcttaccaaaagtttagcaggatgacaatattgctaaatttttgtgggactttttatatattgacaacaaactaaacgtagatgttttttttgaaactttacccaaaaaaaatttggtatggttgaaaatggtatcaaagtgaataggcacgtagaatgagaaatatctgcaagatgacggtgtgttgcttagctgctgctgagcctgagaagattgaaccgtttagatgatgtcagctgtaattttcagggcctaattatctaccacagcttttctcctcaaccaaatgccacattgccatactataaccgtgtatgcaaaacacagaacacagagagtatgaaaatatcatagcaatcttgatgagtagtatgtatttttccatactcccaattagctagtccttatcaaggcaaatcattttttttccttttacttttttggaatgaccaaggcaaaaaaaaaaaaaagcacacattgatagcctttcggggggaaaagaacgaaaagacacagggacacagcagagtgaaaactgaaaagaaaagggaaaacactaagctgcatgcacctttctgctggtgggccctcggtgcaactcaccaccttctagaaggtcattcttttttttttcctctctagagaatcatctcctcctctctgtttttccttttttggtcggggaaacgcatctcttcagttcacgctgcatgcatgcttagctctgtggcatatatatattggcgcgcccacaaaatcacattttttttagagaagggtattttctacccggcctctatatccaaccggatatatacggccattaagatagggaacttagccccgcaaacaacccaatctgaaattcgctccataggagatttgaactcaggaccttggagcactactcaggtcactgtaaccactaggctacattccctttcgtaatcacatacaaaatcacatacacaccaacatgctatgtagtggtgggagtgggacaatggtacatatgcatttgtagaataatagagtctaatctttagtttttctggtgtgacctcaagtttataggagaatcacttttcatttccccaaaagattctatgattgagggttgatggcaataattaaaaggtgatatatatagtattcctaaaatacaataacttctagcgttcagaaatattagatatgttccaagtcaatctttttaagcttcaaaacaacaatatatgttatatttagattggatgcatgaaaagtatgtactacgcacgtagatttgtctcaaatgttttttttataatactgtaattttgttgagatttgaaagtatttcagaaatagagagcagcgatcaaaatctgtgtaagaccatgctatatattttaaaacatgttttcgtcattgagaaaaagagtaagtgggtaacctcttgactggttgcaggcaaagtatacattggattatgatcggcaagatgtaatatccttttcacatcaaggatcagaagagcatccaactttgcatatggcattacaaaggttagagggtagatttcaagtcattttctttctttttttacatgcatctttcggttcatacattattcagatattttgtggtaatatttacacatatcaaagccacatactatggcaataaatgaaaaaaaaattgttgcaatagcacaaaccaatgtaatagtttaaaattcgttgcaatatactattaccatggcacttgttataacggttggcaacacatttttattttgtttgcaattagtgtccgttgcaatgaattttggtttaatgcaacaattttttttgttgtgaaaaatagatttacttctatagtggctttaattttcttcaaacacgaaatgaaacatcgatacacatgtctatgtgcacatgcatgatcgataccacatctttaattaacagctctttatgctagctccatgcattatttgtcaaaaatcttaccatatatatgtacgatatgtagtgataaatcatcactatcgctggaaattgctcttgtaaatatattttatgattcttgtcaagtctacctgtgtcgtcggatttaggcttcaagattttttttttagtaattcagtggttgaattatatttcctatcggttgtatgcttaccaagttcatacaaaggctaaaatttgtttgcactcaatatatagaattgatctataagtagggcgagagaaaatttatggatgtgtacgctccacaaagaaaattaatttttgtttttggctaaacatgatctaatgtatacgccatactaataaaccattaacaatacccctaatgtacaactttaaataatataaatggtttttattttcagcttctatcataaggcacacaatttatccatgcctaatgtacaaaccgaagagaggttaacttcagatggttaagatgttagtgaccataatgtaggtgcggccattacactccttgagggagaatccatcaaattcgatgataaatggaacggagtccattatcataatttggcttccctagtttaagatcagttatatgtaaggagagacttatgataagcaatattattatttttcacttactgtgcttcaataatcttctctattaccccactcctatatgaaaatatcactgatcaaatttaccaaacttatacctttatagtccaccatatacaagaatatcttcctccactacgtgtacaactgtattttttttcgctttcactatatccttctaaaataccactacctccatcttaaaaaaagacttcacttcaatacaaaaatctagacaaagtagttaaaaaaaagtgaggtccatatttatgtccagattcatatataaaagtgaatttctttttacggacgtcatattatctaattttcagcacactttaaaaaaagagagagagaaatcatagctcaaatttgtcctcacactcactctccctctacttaaaccctcctaagccctccttccttcactgagccacacacacaaacaccctctcttccactttccacgtcacaaagcaaagacacgccacactgctgcttgctctgctcgccatgggcggcgccatcgagcgcgacggcgcgctcctcggggcggcgttggtggagccggaggcggcggagctcatcccggggttgccggacgacgtggccatggagtgcctggcgcgcgtgccgagccggtcgcaccgggcggtgcgccgcgtgtgccgcgggtggcgccgcgcggccgcgtcggaggcgttccgccgccgccggagggcggccggggcggccgaggacgtcgtgttcctcgtccaggccacgccagcgcgcggcggtgacgacgggaaggggccgtcggcggcgacggagtgcgcgctggccgcggcgaacctcaccacgggcgagtggcggcgcgtggagggcgcgggggagggggaggaggaggcgtggggcgggggcgtgccgttcttcgcgcggtgcgcggcggccggggacggacggcacgtcgccgtcgtcggcgggtgggagccggccgcgctatgcctgacacgcgacgtccgcgtgctggacgtccccgccggtgtgtggcggcgcggcgcggcgatgccggactcccggggcttcttcggctgcaccgggagcggcggcgtcgtctacgtcgccggcggccacgacgagtccaagaacgcgctccgctccgcctacgcgtacgacgtcgcctccgacgcatggcgcgcgctcccggacatgtccgaggagcgcgacgagccgcagctcgtcgcaaacccgggccgcgtgctcgccgccagcggctacccgaccgacgcccagggcgcgttcaagaagaccgccgagcgctacaccaccaccacaaccggcgacgcaaccgcctggtccagcgagggagacatggcgccgaacaccgcggagacgtgccttgccgcggtcggcggcaaggtgtgggccgtcggcgccgggaagggcggcgtgcgggagtgggacgggggcgcgtggagggacgtggcggacgggccgccaggcatgaaggcgtgcgtgaaggcggtcggcgcgggcgacggcgacggcgccgccatgttcgtgttcgtgttcggcaaggtggaggacggcaagcagtacgcggcgtgggtgatggaggacgccggcggcgcggcgcggtggcgcggcgtggccgtgccgccggggtttggcgggttcgtttactcgggcgctgctgtgcgggtttagccgtgatcagtgtgctgtcaggtcgtcaccacctgacaaggatgatccataggaagaagaagaagctgttgcggtggaagtactggctgaaccggaggagggcgctgtagggcgtaggctgtagctctcgtcccgacaacagcgccaaggaaccagaggaagacggtggaccaggtgtccaggtttggcctgtttggttggtgacatgatgaaaactcatacatgaagctatgctgaaagtttgaagacatttgcctgaccaagcagcctgtgagatgagttgtttggtttgaaccatgtgcctgagaagaataatgcaatgtcatactgtaataattacttttaatagacaatattaacagatagtattaactcaacaaacatgatcaatcggtgggaagaaagaaaagaaaagcaagaaaaagaatgtaattaatagtgggacccatagatttcacatcaccttaatcttgctactagtagcttatcacttgcatgagagacgggcgttggattttcgtcgcttgagagcaactccaacagcctctctactcagctctccaagctaaaaatttagcaaatgaactaaaaacactactccaacagactctccattcaactctccaagcgaactgtctctccatccgagctcatccactagccaaatttggctagcctaccaggctggctatcctccttcccagtgctccatctactcgcgcttctcctctccttctacgaggagcttatcggacaccacgagcaggcgctgggacgcaaggacgacgtcggccaccacgaggagctcgtcggcgcctgggaggaggggctccgaaaacctcccatccacatctggcgccgccacctctgcccccgccgcccagccgcatccgccacggccgcccccgcgcccggcctcatccggcgccgccgcctgcgcccccggccgtatccaccgcggccgtccccgcgcctggccgcatccgatgtggccgcccgtagcccttccatcatcggcgtcactcaagaatggcaatagaagaggaagagggggagaaagaggaaaagggagagaaagaggtggaaggtgtagtagaggctgacgtgtgggttccaatgtcatagactcataatagagagggtagatggagaggctgttggagtgaggaatgagtttggcttgacaaatcaattagagagttggctatatgggtgtttggagagtctaatttagagaggctgttggagatgctctgagtcaggctaatcaaagcggctagctatcaggtcaggccactgcaggaacacggggacaacaaccaaacaggccctactctttcggtttgaaagtttctaccggacggtggcaatataccgaattttggttcaaaatttccaaaattttaaataaattttagttacatttgaacaaaatattaccaaattcacaacaaaaataatataaatttaaaacttcggccgaaataatatcatatcaaggggtccgatatgatcgaaatttcggaaatttcattacataattttgaaccattcgctggattactggagggacgccgatcctcaaggcccatcgaacctaatccacagtatcatgggcctcaatggaccgtgtaattctcatccatgtaaactaataggaataagttcacttggtgaccctcaaaagtgattgaaatctaatccgtgaccctaaaccacaaaaccggatatcttgacccccaaactaagaaaaccggtgcaatttgactccctcggccgttttggagggtggtttcgctgacgtggaggtattgacctagtctgtgggctgacgtggcatttcaattaaaaagctatacgtgggacccgtttgtcattcacacacacaattatgaggcccactgacatgtgggccccacatgccatcttctccctttcttcttcctcccctcccttctctctttctttctccctctcccctacggctgtccgcggggagcaagcggcggcggcggcgggagggcaggcgggcgagggcggcggcggctcgtggctgtgggaggacgagaggaacgacggcgggcgggagaagcaggccgcggcagcgacttcaaaaccgcgtggccccacggcgaggcagaaccactcaaggagagggatgagggagagcgcgccgccgaggaggtcgcatcacgccgtcaccccccctacgcggccgtccaccgagaggagaagcgccatgatccggtcgccgctgccgccgccgctgcttcccctcgtcctccctctatcatgagctgtcgccgccctcgcccgcccgccctcccgcagccggctccccacgtcctcccactgccacaagccgccgccggcggcggctcctgcccgccggcccccgtccctcagccgccgctcgcaccgccgccggctcccctcgtcctcccactgccatgagccgctgccctcacccgcctgccctcctgtccgccggttacagcgtcaaagacctggtcggcggcggccgagctcgccgtaccccaccgcgtgtgcctcccgccgccaccgctgtggtctcctccgtcttcgccgcagtggagctcagcctgggcgccaccgccgcgcctccgcggctcaccaccgtctccaccactcgccgccgtctctgcccgccgtgggagagagagggagggtagagggaagggatacgtgggtcccacaatctattttcggtgtcaatgacaaatgggtcccacatatatttttaattctaaatgccacctaaacgccacgtgtaaaggagacccggtcaataccaccacgtcagcgccacgtcagcgaaaccacgggcgccgaccggcaatgatcactatagaggagttgattacaaacgcagtggatacattgggctgtcgcaccctccccgtgcggcttacaagagatatatataagaaatctagaagtcctagtggataaagactagtcatactaggaaactaatccgaatatattgtgggcccaaaattcggatcacatatttaacaatcttcatcttgagacgaatttcccttatagcataaaaatcttcaatctccaaacaacctcgtaatgataaaataaatgtgcgccaaatagtcacttggactataatccataacacccttgatccagaagaggtacaccatacttcaaactcgccattgggaataaatcctgaatctgctggtatgacattgtggaacccagcagagacgcgaaatcgatgcacaaacttcaaactcgccatgggaataaaatcctgaatctgctggcatgaatttatgtaatcctccacgtgatctggacaggacccttcaggctccctctcgatgacttcgcttgtgtcctgaaatatgtatgcgcaactgatagactagtgcacgacaacacttccttttcatcctcaatatatgcaccaacttgcatcttcacttgccataatgagtatattgcatctcaattcaggagcggtagatcaacctttaaactcgccttggaaataaaatcctgaatctgctggtataaattgtggaaccctagcagaaacgtgaaacactctagatgcataaaaagaagtatttggatctccggataaaatctcctggtaaactggcgtgtgggcgattcaccaaatagaaccatagcaagcaatgcacaggacttgatttcccggtagaacttcgtgtgcacgaagcaaaaaccaacgtgaaatttactccctccgtcccaaaataagtgtagttttagcactgttcatgtctaacgtttgaccgttcgtcttatttgaaaaaggattatgattagtatttttattgttattagatgataaaatatgaataatattttatgtgtgactaatttttttaatattttttataaatttttcaaataagacggatggtcaaaacgctgagcacgtatatctatggctgcacttattttttttgacagaggtagtaattcgcatgaacagggcaggaacggtgggcttcctgacctaatcttcctgggaaccgtgcgcgatagatggcctcctgcttttctcctacttttcttgcgctcctccttctgcgatggctgtgcatcggctgctgctttttccttcgtgacgtgcgctgctgctccagcgttttctcacgcggtcgcgcggtcaggaggacggcgatgactcggaaattcggaattgacgagacggcgcgacgaacacgcgcctgctgccgccgatcagatgagatcgatttcttcgatcgtggaatcacgccggtggccgggattgatagatggatctcaaaggctcagatacacttgttatgaaattagatgcacaacagagacacaaattttacatgaaaaatccttcgggaaaaaataggattagatgcacaacggagacataaattttacatgaaaaatccttgcgggaaaaaatacagacgctgatcggcaatgattactataaaggagttgatacaaacgcagaggatacattagaaatctaagagtcctagtggataaagacttagagtcgtagtaggaaactaattcgaatatattgtaagcctaaaatttagatcacatatttaacatagatgacatgcatgaaccgaggggatattccctccaggatgaatatactttcccatcgatatagaatctgagagctcaggcaactgatcatcatatggcaactcggtggtaagttacggtggggactcaattcggattgaagcgtaatattaattaaatatcttaaagcacctagtaatatctaagttacctataggttttgtgtattcttgtgatttgctttgtgttcttgttgacatcgagtggaaccctcacaatattggtattttatttttaacaatactactattaagctatgtttagttccacgttaaaattagaagtttgaaaaaattgaaacgatgtgatagaaaagttaaaagtttactatcaaaacaaaataccctatacctgtcattgacaaattattggacaaattagctggatcataatggtttaccaagctggacctaaggtcttggtacaaccaaatcatgatagccgagtgagaagagtataaaatggcttttcaaacacactcagggcattttttttcaatcctacatggcatgaaatttgtacagagtatccacacactcgtgtggatagttagatgggtaaatgactcacttatatcacattagtaactcaaatgttcattttgaaaatagagtgacctacatgacacacttaaagaagtttaatgaccctccacgtaatatatacacgtatacaaattttatatacgtatatatgcaaacattatatacacacgtatgcaaagtttatatgcgtacatacgcatacaaagtttgtatacgtacgtatatatgtacaaactttatatacgatacgtataaagtttgtatatatagtagccatgatccacatgcacgtcgtgctcatggcgcacgatcgatgcgacggcaaccatctccctctcgacgtcaaccttcgacgagagcgtcgagggcgccttggagcaccggctgcatcgcgtacggtacgtgcagcagataatgatgcacatgcagtcaaacatccaaatagtctctctctctctctctctctctgagatgaaaaaggaaggtagcaacgacacaagaagaagacaaaaaaaaatgctactgggattgtgaacactgaacaaacatgcatgcattgcggtggtgtttggatatacagggatcaaactttagtaaatgtcaggtcagatgtttagacactaatttaaaatattaaatatagtctaacaataaaattaattgtaaatgtttactgtaatatcacatagcttaatcatggattaattaggttcaaaatagatttgtcttacgaattagtctagattatagaatgagtttataattagtctatgtgaccatccaaacatcccctacattggcatgtagagagggtgtggtactattcttttagcaaagcccaaacaaggggtcattttattttacagtaccctctacttgagctggtagtagtgtagtaggaaccaaatctaaccattgatcctgatgggtactttagaattttacttctacaccgtggaagggtattttcgttatttcaggtgcttccacgaaggctagtgattcgctcgttcccgttcgttgcgcacgacggccgcagcccgtcctcgcgcgcccgacgtctgccttcgcctttcgcgaggcctcccgttcttttcgcgcgaacccactgccacggcggcgccgcccctcacctcaatgcgcggccgccacccgccgcccctccttgcgtagtcgcgtgaacccacggccacgtacgacggcgccatccctccaccccctgtggccctgtgcaccgcagcaccgcttcattcttgggatatgatggtgtaccggcctgctctagggaaggtcgctttgtcgaaatgtgttcttgaatcactcaattgctatactgcaaaactaattactgaatcactgatgtttagctgatgatgtataatttagtcattttcgcattagcatcaggcaaatgagctaataccgaagctcgtttatctgcagcagaactgagttgacggactaagtactgagttctagactgaactgaaataaggctaaaaaagaaagctcaacgactcgcggttgcaagcacactctcactctattagcgtcattctaatcagctatccgaatctacaatttgactgacaaaaataactacaatcagatatgagctaaaactgtgttagtgtcttcttaatcagctatttcaatctgcaatttgaccgacaaaaacaacaattgacaagaaattgaccaacatcagcatggctacgacggtcttgaacccttcatcggtttgatcaccttccggccttgtcttagattctgatatggatcatcccacttttggttcggtacggtactaaaggtcctcggacttccaggcaggtgttgctaaaccttgacgctacggttgaaacaggtgtactagcagagtcctttttttttttttgcgagagtactagcagagtcctttgacaggatctcatcatcagtatcaaattgacggcactgccaaacgcgtgaagtgcggcggcctccgtcgcgcacagcagcactgcatgtctgcagcatctcgcctcgcctccgtgcagctgtgaaccgattgtgcatattgacccctggactagattacgaacttacccctaagccaattgcaaattcatcacaatgccatctattacatttccaacgttacccctccacgaattatactacatctactaccaggtgtagtaggattgaatctaatccattagatcgaatcaaatggacgtctcacattcattttgaggtacttaaaaaaaaatccaggcaaccatgctgctgctgcggcagctttctttttttcttaattatcacggaggaaaaaggagaagcaaggtcttcatcatgcaacacacggacgctcaatttctgcagcatctcacgctagcattgtggtggagaataatactatcagaaatgcagaaactaacacaatgcaattttttttgagataataagtgttcacattacaaatgtgcaagaagacacagcaattgtgcagaaaccaacacaatgcaattccatgtgctcaagctcttaattagtagataataagttttcacattacatattacagattacaggaagagaaaactaagtactattactagagtaaaccagcaggaagtcaggaacccagaccatcaacccctaatcatgctcctaggcaaatatccatcaaagacatgcatcgaagaaatccatctgttttggattctcatagagtagaatttagccggcaccaaatgtgatccatccacaagcctcgacgccgggcagaatgcgtaagtaatccagtgagtccatacatccacctggctccaagctgctgtgaatatcatcggaggcgatgggaacccactcactggctggtgaatcactaggagataaactgatccaaagaactcaggcggcggtaggacgacgacggcgggtgggtcacatgggcagccgcatgtcccgcaaagaatgcggctacaacaaaacgaataccggagcgctacagcgccgcagatagagcacctcgccagtgggaatgcctgtggcacaggggcgttccacggatacacgacacggcgtgcgccgccgccgcctggttcttgtgcgccgccccctgcgcctgcgcctgctccgccacggccgccgcctgcccctgcgcctgctccgccatggccgccgcctgcgcctgcgccgccacgggcgccgcctgcccctgcgcctgctccgccatggccgccgcctgcgcctgcgccgccacggccgccgcctgccgcctgcccctgcgcctgctccgccatggccgccgcctgcgcctgcgccgccacgggcgccgcctgcccctgctcctgctccgccatggccgccgcctgcgcctgctccgccacggccgccgcctgcccctgcgcctgctccgccacggccgccgcccgaactatgcgaacgaggtgaagattcagatggcgtgggccactgggttgggaacccctggtgacgaacaccggcgggcgcggtcgccggccctcgcacgggcgagcgcgagaccctggagcagacaggggtgtacggcgatgcggtcggactcagtgtgggcgatcgggcgcgagtctccagggagcgcgcacctggcgccttagagaaggcgtgagatggtggtgggcttggagtagtcctcgccgcggcgatgtcgccggcttcgagcggccccgcgccaagcgcgacgtcgtcgtcgccgtcgtcgccgtcgtgggagtcggtgtcgtggcggagcgcgtcgaacttgttcaccgttcccacgaagcggcgcatctttttgtcgacgcggttcgagggaacgagacgcccgcggttgcggagccgctccgtagccgtaggaggagacgacgaggacgacgaggaggacgtcgcggcgcgctgcttccttttggcggggtacgccctcctgacatcgcggtgcttcgacccgacgaaggagccgtccgcgtcatccccagctgtcgggcgggatcgcctcggcctcggcgacgagaggacggcgacctcctcacgggacagccgggaaggcctcgccccggatcgggatcccgaccccttgcatccggaggccgtcgccgacggcggtgagctccctccgcggcgcacgcccccgctcagctgcgcggcaggtggtggcgacggcgagccacgccgctgcatgacgctgtcgatgaacatccaaagcgtaggatgatgtggcgtacccatcgatagggtttttcttgaggagaggggaatggttgtgatgggtgggagggttgggcggacttgggatgaaggtgagaggggacgacgaagaatatctgcttttatagtcctccgatcgatccgttgtgctctgcgtgaaacaacccgaacccgactctgaaacttgtagtaccactgcaactggacccgacgactccaacaaccccagctactactacgtgtacagtatactactggtggtgggcactgggcactacttgtataatactgtactactaccacgtacagtactctactactaataccctcaggcgcgccgcgcgtgtatatacatgcatacagtactgtacgtgagtacgtatacggagtattggggaaagaagttgccgtggattccactaccacctccgagccgtttgcactgcagtgggcccgtccctgtccttgcaattagccctgagtacgtggttcgctttgcctttcagcctctctctgtagactgtagcagaggaggatttgccgctgcgagccgcgtgcttgtcacgcgcaggcgcagcccagctgtaccacacgcacacggcaaaaaaaaaaaagaaaaaagaaaaaaaagatgcgcaatgcgcccaattttaattttgtttcatcagtaaaaattcgtaatcgtaatagtgtgatgtactagtacagaatgcatacacttcactagttgcaacgatgagaagaaaaaaaaaatctctctcaacgctcagtaatagcatttgttcaagtctgattatgtgcagccatgtacaactggtacatactgtactgtactcatgtactgtagaggggtatactgtaggagtatctatggtggtattttgatacagggactaaacctatcacataagatattttaacactaatttagagtattaaacatagactacttacaaactaattacacggatggagactaatttgcgattcgaatctattaagtctaattaatttaagattaacatatatttactgtagcactatattatcaaatcatagactaattagacttaatagattcgtctcgcaaattagccttcatctttgtagctagttttgtaattagtttatgttttatactctaaattagtgtctaaatctctggtgtgacagggactaaaatttagtccatgatccaaactagccatcgtcagagggacgctcagcgttgctactctacttgtttggcatcggacggaggcgaaccaatacatcataccgatgtgttccttctcgactcacaccaacaaaatcagcccacggacattttcgtgggttaataatttgttggtgtggaccaagaaggcgtcaattgatcgatcagttgcgcttgttctcttttgtccaatgcgagtggcgtagcgacgttggagatgtctaacatagattgctctatattacatgatccgatttctacgagtaataaggaagccagaaaccaataacttataattaattgagttttattactatctaatattttaagataatttatgcatgaaatttttttttctataaaacacactactgtttaacggtttaaagaaaatgctagatggggatggagtaatctcgtttatcgtcaggacctcactgcgaccggcgaggcgcgcgcttggtggaaccagacgcagacaagacaaggtttggtttgcgggggtggggcccggtcgaacagggcacaggaatcaggacaggatgccaggaactgtttcccagccttccacacggcacaaaagtactccctccgtcccaaaataagtgcagttttacactattcacgttcaacgtttgaccgtccgtcttatttgaaaattttttatgattagtatttttattgctattagatgataaaacatgaatagtactcaatgtgtgactaaatgtttttaattttttcacaaatttttcaaataagacggacggtcaaacgttgaacgtgaatagtgcaaaactgcacttattttgggacggaggtagtactttttttgatcttctactagtactcctccaatactatccccacggatcggcatcctctgctttagctttcaatctgaacctttcattaatggatcaacgatgcatatacttcccttgcccatggggcccacctcgattcattaatggatcaacgaggtctacccatggggcccacctccattcattaatggatcgacgaggcctccaggactgaacaagggaggagattggaaagctagggcctcatctcatcgtgtggcttttttcgtaattagctcattagagaataaaagtaaatttatagatataacttttatatatgtgttcttgatgatttaaaagctgatattgaaaaagaaactacgttgaaaatatctcaaaatcaatgttaaaattaagtttgaaaatttaaagtttggcttttactttagctgaataggccatccgatgggagccctactttccagcataggttgttttgagttccattcaaactttcaaaaattccatcacatcaaatgcgaaaaaaatcaattgcatagtttgtaattaaattgtgagacaaatcttttgagcctaattacgctatgatttgataatgtggcgctacagtaaacatttactaatgataaattaattaggcttaataaattcgtctcgtaatttacaagcggaatatgtatgttttttattattagcctatgttcaatacttcaaatgtgccctttttttggacaaattgatctttctcaaaaacttattttgaaactggtccttgcaaaaaacttcaaccaaaaataggtcgtcgactcaacgctaaggaccttggcgctgacctataacgtcttagcgccaacttcattgatgctaaactctaatcgaaggtggcatggatttgctgagtcattatagctcagcgtcaaggtccatttaaattaatgtggaggcatccatttttaatgaaccaccaatagcacaatggcacttaggtattgacgtggcgcttaggtgacattggaattaaaaaatatgcatggatccagttgtcattcaaaaattatatcatgggacccactaacatgtgagtccttctctctcccttacatctctctttctctcccctcctccctcctgtcctttctccctcatcgcctccttctccctcctccctccctctctcccgcggcgagcggagcggtggcaggctagcggagacgcaagagtggtggcggcatgcactagagaagcggccttctgagcagtcgtcctctggctcctccgcagagtagctggggtcggcgccgccttctccatcttgggcgcagcagcggtcggcctagtggtcgcaggggtcgggatcggcgctggcaaggccctcgcgcggcatctgggtacttcctccgtcccataatataagagattttgagtttttgcttgcactgcttgaccactcgtcttattcaaaaaattttgaaattattatttatttttttgacttattttattattcaaagtattttaagcacaacttttcgttttttatattagtataaattttttaaataagacgagtggttgtttaagaaaaacttaaaaattcttatatattatatgatggagggagtactacgcagcgccacgcctgggtcacaacccctctctctctcacacacacgcgcgcacacacacaacttgtcactttgccagtgccagccctggccgatcggatcacctcccaggctcccatccctcccttttgcttttcgccgcggtgtacgctgctgcctccagccgctgtcccctccccttcctcccgcggaaaccgctacggcacaacgcatcggaggcagatatggtgtgtgcatgcatttgcttgactaccagtccaccaccaacctctcccctacacacagagagagagagagtgtgtgtgtttttgtgtgaggaccgcctcctgtgcagctcttcttccagggtactactccattttgctgcatgtaggtacattcatgtgctaattaacgaaactgtttctactcacaggttagtactcctaggttactgatcacaaaaaccgagctaccacataatacataacttaatcgcagttaaaatcacacaggcgtcacaggtactactatacctcccacacacttaactccggtttggactatagagatgagggatccgagagatgaccaaaatttggctgccttttccttttgcttttcgagtagtgaacgcactctgcgctgcaacgtatacatgcatgcatgagccaaaacgctgatacgatcgctttgcaaaggagagagagatcagaggcgagcagtacaccgcctggcctgatcgtatttgaaacgtgacacgtacgccgaattgccgatgatgatcaggccatatggttttaatttcactgtaaagttgtacagattaaaagtttataagagacaagctttatcttagtggataaatattttgtaaattatttgtattcctttttttaatttaatattaactgtgggggcttcccctacagtgtttccctaaaaaaaattgtacagattattatttatctatctataattaaaaacttggtagccattaactacggggtcacatttttttcaaacttgggcacagctgtggctgtgagtatctcatgtgggcccaagcacgtacgagagataaggccaaggcgcatgagacacccatgggtcattccggaatcttcttttttccgtccgttgtgaccgagttgtgactttgtgttggaggcgaggactcatcacactggctcactgcgttcatccatgtgcttgccgtagtatctcggcgtccggcgggaacgcgtgagctcggcggccggtgatgttggccgcagtacctcggcgtccggcgaggaggcgcgtgcgctgaggaggcacgctaaggaggagacgatcactggggagcccgtactcagtcatcaccatgggtatagctccttagttttcttcttgtttttcttctctttctgttcagatcatcatgcatgcacgagatggcgacgagagacacgaggtgtcacagttgctgcatgtctgagttcctgagacaccgtccaagataatgaaatatgggctacctcggtggagatcgccgtcatatcaagctgctgtggaagctgtcaaaccatcccgcccgaggttgtgctgctccatcccgtcggaaactccggccgccggtgacacatcctggcgctgcgacgtcatcgagatgccaggcgtccttactgtgctgacggcagcctctgcctcgcgacgcggccaacacctcaccgtcgccggcgctacaatcttcctcatgttacaattgtcgagcggcccgaggacaacgccggagcgctattgcttggtgcccgcacgccgttgccgagtccagccatgatcccttcgcttcagctggccgaggtcgtcgtgccttccgtccacgacgctttcgcttcggcacgtcgggatcatcctcgtactaacagctacggcgtcatactcgccggccttgaccgctccatgacaaaatatttatatatatacaccgtcatcgatgatgattgatgactcgtcgccgtcgccggtcatactctcagacctgcacggccagggcgttttcatgattgtcattgacgccgaggtgatgcgatctcggccagaaaccggaagaaccctcgtcttcgtcatcaatcattagcatacatttatcctcgcggatatcaccaatggtgaacctgttcttggtcatcatcgcctacgccgattgtttctccgccgatggcaagcccggccttgtcgtcgttgccagcgccaatcatgcatttgtcgccaacgtgcaagtttggagccgccggctgttaaaaaagaacgtgcttggcgtcgccgccggctgctgataacctcgcgttcatcgtcacggctagagtcatcctcatgccaacgacgacggcgtcatgctcgccaacctcgtccgttcgatgacgaaacccttatatttatatatatgacccgccatttactgcttgtttgctgatggcgaagtcctccaactcgtcgccgccaacggcgtcatcatcatatgaatcctcacctcaccgtctagtgatcacgagctcggcatccctaccggtgtctctgtcactccacagcgcctatacactgacggcttctttgtggcaaccatcggctcactcccgagtcaagccgttacgatcggaggtggctcaacatcatttgagtccggccccgattgtcggcgcatatacaagagggccaccccactcctggaacgcatctcatcgtttccaggctaggctacgcccctaacatcccctaaaactactcaatactaagtgtttactgcagtgatcagacgactgaccattgtaccatgacgatggtcggccattgccgtggaaactagaagggcgatgctaccccaactgccagtgaccacaagcttggcatctccactggtgtctttgttgctcctagcaatattcatacacatactgatgacttcttcatgctctcgagttcggcactaccaccggcatcattaccgatagtcttttcacggctgccactgacgtgttcggcggcatcaccggtgttaacgccatcatgaccgacaaggttggatggatgggtgggcggagtttacatcgagacgacgtcaccgacaatggcgcgtggaccgacaaggccgcgaacactgccggcgcccacttacaccctcaccacatccgcaccttgcatgggagaacatgaagctaatatcgatgacgacgactagcacagcttaatcggaggtgtctcgcgggttcaacccgtgagagtaactaaccgggtgttttccgagaccccgaaaactaggaccacataatcgccaagtcagatccaccttgcctataggctatggagcgcatttgactaaggattttgtattttttgtaattctttgagaattataataaaatgcattttccttcgtccattttattttttttacttagtacactggcacgtccgcacatattattttattttacttccctgggcggagagatttgaatttaaattctctccaaacaccctctctctggcggcgccaccaagaacgagcaagagaagctactctagctagtcgtgtggggcgctcatactcggagacattcacggtggtggtctcgagctcccctcctcactgatcagcgtgataggggccgacagagctatgggtagtgagaatcagggcaccgtagaccggtggacctccaaatggtgtggatcaaggcagcataggtgcacattgagacaacatggtgtagatcgaggcggcacatcgacaagctctctagcgcagcctcgatggcagatctgcctagggtgatgggtggattttcccatggtgatggagtagcaagcaatggcgcagatcgacaatgacaagtcctggtatgttcccagcatcgcggtggatcttccaagctgcacggatcagggcgtcgggagctaggtgaaagagctaggtgtggcaattgattggtcagtgtgaaagtgaatgaaggacgatgatactatatctgtggcgggtgatggtagattcaccatcataattatagtctttaaaatgaatatagatttgtgtatgggttttctgctctattaagttgttttgttcatgctgtgagaaagagaggttgaaaaccgctgataaccatttcccaacaataattcgccgaacaatgagaaatcgcgtgttccttttgatcttaaagggatgattggattaatttatctcacttcacaccaactgccctagcttagctctgcttcaatctctcttttcatgagccactgatttctctttggcagacttctaccgaatcctgccagggccctcacttgtcgcctctagctgcagctgttaaaattaattgagtagttgtgtgacagtgtgaggtggtgtttggatctatggacttacctttaatctctgtatttagacactaatttagaatattaaatataaactacttacaaaactaattacataaataaaaactaatttgcgaaacaaattttttaagcctaattaatccaaaattagagaatgtttactgtagcatcacataggctaatcatggcttaattaggctcgatagattcgtctcgcgaatcagtctaaaattatagatgggttttattaatactctatgtttaatatttataattagtgtccaaacattcgatgtgataggaacttaaaagagtggtacgagtccatgcgaatcttaggaagaatagcacatatttttggcagggttgtggagaacagtcgtactgaccgattaaacggatgtacatatatatgtccgcagtaacaaaaccgtttattatcgtggtacgctcaacatttatttttcatgaacattaaaattttaattttagcaattaatccaccatcttccgtttaattgttcgtggcatgtgtatttgatgacgatccaaagttgtttttggactttgtttagtatttcttatattctgttatgttttacttattgaatataaccaaacataccattgtttgctgtttgaattgactgttggaaactatattttaagttgatgttaattataagtattcaattaaaagataacattaatatattcaatttatattgttgtaaccatttaaatgtccaaagtacgtacttggcaacgtcatatttgccaacataaaatttccacatagttcttattaatcttgtattatgattaatcagtgaacggtacccttttcgtccgaaaagcatattccgtcttccacaacaatggttttttcatcaacttcgatttccacgcattcttgcatcacgtccagaaacaggcatcaccatggcgtcacaaattttaggccatgcgtgtgtttgcagtcactataatttaggccctgtttagattccatcttttttctttaaacttctaacttttccgtcacatcgaactttcctacacacacaaacttccagcttttccaccacatcgtttcaacttcttcaaacttttaattttggtgtggaactaaacacaaccctagtcacaaactaataccttctgacctaatttagagtagattatagttatttttttaactcagaatagttgtatatattatatatttgagttttgagattgcaaagcaaagcacgggtacaatactaatgtttgtatagggaaaaaaaatgaaaattcagctcaaacgaattaccaggtctaaactctaaacactgggaataatgcctttctgatgttccagaatcagatgtccaccggtgaaagtatttttcacaacaattccgtcaaatggcttgcttgctagcttggatccatccatccacacatacatatagcacctaccggtctgtaactaacaaaaattatgcacaaacagattaaacaaatcctccggagacagcacttacttcaaacggacctagcgccttcatgccaactccgatttaggtggtcttggacttcatagaaagtttatctcgctacctttcaaatgcatccggtgtcatgtccaaattcatctcgagtcaacgggaattgccaaaataagacagtgctgttgttgaaaccgaacttaggccttgggccttgtaatagactaggcccatctcggaagtgtctccctccacctccatgaattagcacttaaccctagctttattttcccctataaatagctttgtacatcgtcaaaaacaattgggttttgtttagttgaattttgccaagtgccattcaccttgtctctagtcctcgctcgattagtcgacgactatagattcagagcccccaatagttggtgtgttgattcagagccacctcaatcgcaactattcctttgtgcttaattacctattcgcaatatttagattgcatcttatcttgttcttgcagtgttctctcgtttgcattgcagggatcatcaaccgcgcgtcacggttggtacgacatcgtttgtggtgtagcgattgcacggcatcctggacttgttctggttggtagccacgtcgcaaacgtcacactcgatcaaagcaagagttatcccctcaccagaagatcgggccacgagagagagcgtcatcatagaaaatctaagagcagatacaatagcagacaagtcaactgcaaatatattttaaggagataaatgaggagagagaagagcagcggcctacagatttacaagctgtagcacggactccaagacgcagtgtgtgtatgacatgtggtaccaggtattaatagtttagtactccctccattccaaaatataaggcataaccaactctaacccaaagaccaagaaaataattattatcatcttgtagttaatcatcctaataaatacaatgcatgcatccaatagaattagagaacataagagtggaggatttaaaaaagtaataatttaatgaagaaagggtcatagttaatggcctatatgcatgcatgccttatattatggaatatctgaaaaaaagtggtcgtgccttatattatgaaatggagggagtatgtaactattgtataaatgagctactagattggctatatatgaattggagctagtagttggctatactattaaacttgctttaatagccaaatcatacaatggttgcttactaaactattaatatatggtcccacctatcatacacacagtgtgtcttagagtccgtgctgcagctggctacagatctgtagcccgctgctcttctctcttagggcacccgcaatggttatctataggctctctacaagatatccatgtcagcatattttcctacttggaagagattaaatgaagagagagagagagagagagcacaaagctatctactaacctggagatagtctatagagaaaaacgaggcaatgcattagagagctatagatacccatgtagacatactattgaggtggtttactattaatctagtctattgctgagatgtacatgttttatagagagcaccttactttatcattgcgggtgctcttagagtaagtttaataatagagccaactatgagcttatagcttatattagagttaacatgtatagtaaatgagctgtaaggttatcttttttttctcctcctctctctatctctcacatatacatttaatgtatttatcttgaagtatgtgaatagatagctcttgcatgagagtcaaccctcttcatttttcaaattctctttcctccacgtaagcttatagcctactattatacttgctcttatcatttatctcattaaatatatttatagctgacttataacctactattatacttgcttttatcatttatcttattaaaatatgtttatagctggctaatagcgctattgtacctgctcttacagcaaactgaaccacaccgatcgacaagatcctagtgtcaggccatgacattatgacaagcagccagcgccgccccactaccaaatacttcgctctctcataacctattacctctccctctaccccaccacgcgcaccttcgctagctgcgcccggaaaggtggatgacgcacctgtggtggccgggacaggaggatgcggcagcggcaactaggcctggatcaggtggtgtttggttggagggacttatgataagtcccttttagcctctaaactaccaaacgggagggacttaaacagactaaaacagcataggctaaaaacctatagaaaagcgatcccaaccctatcctgttgctctcgctctcacttcactctctctctctctcacttcattctctctcctgtactactcgactactccgctctccccatccggcgcaaggcgcaagctcacgccgctgccaacgccgccgcgcgcgagctcccgcggccgccgccgacgccgcgagctcacgcggcctgccacctaagccgcgagctcacgcggcctgccgcctccgtcgcgctcgagctcccaccgacgccgtcgcgcgcgagctcccgcagccgccgcctccgccgccgtgcgcaagctcacgccgctaccccacgctagctgcctcaggccatggaggatctggtgcgggctaccattttagtactatttagtcccttcaaccaaacaggctatgactaaaaaggactaatgttttagtcttggggctaaactttagtcctagtcctgggactaatgtatccttagttcctaacttttttttcaaacttacaactttttcatcacatcgaaactttactatacacacaaatttctaatctttccatcacaacattccaatttcaatcaaacttttaattttgatgtgaactaaatagaacatccgcagagcagtactggaggagggtggaggagatcggaaggctcggcaagtggctggccaccgaggacgagcatgcatggtaagaggctaagagcatcaatgacgcttcatggcgaccagagatgagggtatcagcggctgccgtgctcctggttctatttgccattcattttgcctctaagactgattctctgcagtgcatgctggaatgctgggtgctgccgcaaacttaattcgtgttatgggagactcggtcggcccacgacggtgaatggattaattaacctcacgaagctagtatctagatcagcatcgacagctggtgagtcttgggaagaagaaaacggcgggtggcgagcttcatcaccgccttctcggccctgttcactttaatgtcattttaaaccttatcaatttctggcaataccaaaattttagtaaggttggcaatattatcaaattttggtaagatagctattttggatgtgcttactttgttgccaacgtacatgctactaaattttggtcattactgtgtagttaccaaatttctggtatattttccaaaatttggtaagaaactaaacatatgtatattcttgtcaaatttacttaaaaaaatagtattgtttaaaatgacatcaaagtgaatagaaccctcgttcaccatcactccatcagccgcaacgcgacgaaccaagcgcaggcagagtggaatcgcttctccgagccctaggagagtaggagctgagcaagacgagggaggcagggttcaagcggaacaacacgttcgcctggagccgatcgggaagccgttggaagagttatttatccacacgtcgacaatccagaggtttcaacaggtctctaatttgttttctacggaggctccgatgaggcgggcaagcgaggagacggcggactcgtaggttttgtgagggatctggacaagggccgacatgggcctagacgccacgcgatttggaaatcgtgggaagagaatcggacgaagaaaaaataacaggtacgacgtacacacgcgcggtgaaaaaggaaatcggacagaaaaatatgcttatatgtgggcaatgagttgggcgacgtacgaaatttataggcaaaaacaccttgaaattttatataataggtaaagattaaaaaaatagagatagagatactagaaaggatgtccatgcaatgcaacggggaaaatttaaaatcaaaataaacatcaaataatttgatcgaggaaacagctaggaaagaaaacaatgacaaaacattttcagatcaataattaagggcatgtttgggatggaggatttccaaagaaaaatcaatagaactgaggaccatagtatattttttttttcctataaggctgttcggaatggaggaatggaccctagaatttctttggaagcaacttctatgtttctgtattctattagtattctagtacaaaacaaaagaaaggaatggaccctcgaattcctttgaaaacaactcctgtgtttctgtattctattatattctagtaccaaacaaatgaaaggaaaacaaattaaagtaaagggaaaatgaggtcaataagtttataaaaccataaactgaaacttattgtcttgttagtttaaataaaattcttgtattccaaacaactcatctacataaagtttcccatattttctaatcttctgttttatacttgtgcattcatgtgttttgttttcctatggtatatataatatatatgaatcaccaactatggttgggtactatcaaacaatccaaacaacgatctaaaccacgacacaatcaagaacacattttttatctgacggtctgacctaacaagagtaacctcaagaacatgcgctcgcttctgatctttcgtgtcctcgtctttctgcttctgctcattggccttccagtgtccctccactgtacaccatgtcatcgttagccttcacatcgcaggccgaggcttccaccgacccggccatgtttgcacgcccgatcccctgcgtcggcgtcgctgctcacctcgatcaccacccccaacccagtctcggagacgccatgggtacagcctcgaggctcgagctcaaactgttgacgggctgaggcgacggctagtgcggggcgacgcagggctctgagctggagtattccgtccccgaggttcgactcgactcaaacactgccggcatggcggcatggtgaagagcagggaacttcacgaggcacgaccgaccgggccgggctgccgcgatttgctgctggcacactggcgctacggcagctgctgatcaaagcaccggaggggaaagagaagtacgcgctgcgagggtggcacttgagcctggagatgctccaagaatcttgtcccaggaggccgatatatcggaagtggattttttttccctcgaggagggcatcccctcgttgctgtgtctctgttgttcaaaaagttatcaaaaaaaattaaaaaaaatatcaaaatagaacaatatatgatatatcttttttgcaaacatgcgaattaaaattcaacttacacaatttgaaaaaaaaacaaatttgaccgtgaattacgtgttctattcaaagtaaaatttattgtttttgtttctacttatataagtggaatttgaatttgcatgtttgtaaagtgacatatcacatattaatttatcatactaattgttttcaaattgtttttatgattttttaagcgacgtataaaaatgaggggatatccaattgagttttccagatatacgtgcaaggcagggagattttattggcgtgtttgattcaagggtagcaaagctgtggtttgtgaccggtctgaactgacgcagatgcgatcccgcgtttccttcctacttctgcacgggtacgccgtaatctcgaatcgctctacgtgggtctgtgctctggagacatggcctcctgtgcgcgcccggccataacgttctcccaatctgacgcgtgggcggtgggcgcgtgcacaagtgggacactcgatcggacaccggacgaaagggctgtttagttgggtaccaacatttgctaaagttgtggcaattaagtttgaccaattaagtctagtatttagttcatgccacaagtgagttatgccataattttttagcaagctgacccacttgtcattgggtggtttttttgccatagcttgtcataattgtggccaacaaatttttagtcatataatgtgtggcatgccacactttgccaaatattttgtggtaagctatggaagtcatccaaatagccccgaagagagccatgtgacgaaaggaaatagactagctaaattcccgcacattgcatcggataaataaaaatttaattatacatatacaagaaatatcatattatttcaattggcacgacagctacgttgagctcaataccgacttatatttctaccgaagtggttttattattgataatcaatgtatttttattaatagtcatatttaaattgtgtagatgaattaatggtagttaatgcagtcatgactggacacaacgaagaacaagaagcattaaggccgtgtttagttcttggccaaattttttttatatgtatggataaatatttgaaatattaaacgtagactaataacaaaataaattatagattctgtctgtaaactgcgagacaaatttattaagcataattaatccgttattagcaaatgtttactgtagcatcacattatcaaatcatggcgcaattagactcaaaagattcatctcgtaatttacatgcaaactgtataattggtttttctcgttcatatttaatgctccatgcatgtgtctaaatatttgatgtgatatttttagctaaaagtttttaggatctaaacacaccctaattcatctagcccaataggcccgggtgcgaagtaaaccctagactaccatggaggccacacgaagtgacaagtcaaacatgtagctaccactctcatcccatccacacctcttggttgatgtggcgctcccatgtcttgcttttttgaggtcatcgttcgtgttggcgcccaatacccaccgccgcagcggggccgcgtcgtagccagccgccactcgatgcctcctctactccagtgccaacaacagggctgcaacgtccaccaccagccgccgctactactccaagccagtgacaatgatgtcgtctccttccctactccagcctccactcctgatgctcgtgggcactacctcctccttttgtaggcgcccgtgccatttcctcctttctcaaagaaggcgtaggtcagcggtggatctgtatttttttaaaaaaaatttctcttacttatgtggttttttttgggggttgtttatttatatgatgcctgatttttgaattgatgtcactatatttaattcgattgttctaattttgttgtcaacattttttatttcaatgtgttgttaactactattccctccatcccataatataagacgcgcgcgtatttcaagattcaacatttaaccaacatttagtacaatatgaaataaaatttatttgttaaaaaatataccattagattggcatttaaatttactttcatatggatataattttgttgctaaaaatcttatagtatatgagagcaggagcgacaggtgggaatggccgtggtagggagggccgtaggtgtggatcctacgatagggaactcggcggtgtgatgctcgacgacaacatcgatgacaaaaacggcggcatgcaggtggaagggtgggagaggccagcggtgggaatgccggaaggtgcggatctggtgacagggagctcaataacggcaaatctggcggcttggggctcggtaacggtagcaacgacgatgactgtggcatgtgggtggaagggtggaagaggctggcggtggggagggcgacgggtgtggatccattgatggggagctcaacgtggggttcggtggtggacgatccgacgggggacggcagggaagggctcagacttggatggcggtggatgagggctcgggctccagcgacggtggcggcagcggcaacgatgggaggggtggatccggtgcccctccctctccagcgcggatgttgctccccacgcgcacaacgacgacggcgatgatgaggacgacgacgatgagtgttttaggtttagggtttggggaatcgattttcagaatttatttttgtgatttttcattttcatggtcagataacttaagcgtccatatgcgaaaatcggattttcgcatgtgattgctctactcatatgaaaaatccgatttttgcatacctttcttttctttcatgcaggcttcccaaccgcttgcaaaaatggagtttggctgtatgaaaaatcgattttgtagtagtgtatataaaaattaaaagtaggaatcttggaaacaaaatcggattaagaccgtgatcaattactaatatttctgtttgattgattacattagatttcttacgtggtagtctttggactttggagacatactcacgtacggaagtttggtagaatacattagtactccctccatcccataatataagggattttgagtttttacttgcactgtttgatcactcatcttatttaaaaaattttggagttattatttattttcttgtgacttactttattatccaaagtactttaagtacaacttttcatttttatatttacacaaatattttaaataagacgagtgatcaaacaatataaataaaaacttaaaatccttatattatgagcggggggagtagtatatttcttactagcttggagataacacaagtctttggaccctggaaacttggagacacactagtctggtagaatcaggctacacatacacaaagcacatcggattccgtgagcgatacgaacgacgagtcgacgacacgtcctaaagcaatgacgaacgaagcaaagatgtgactattggaaaatagtaattttttagttagttatatattattattattattattattattaagataagataggtaaagatagtagagatattgaagcaccactagttcatatatgaattttaaaaatcgattgtcgtacgtttgagttgcttcatatccccctgattttcgcataaagtgagcagacaggcgtatcgaatcttaatcttcactactgcaaacattatttcgttagcgactgaatcacacaaattcgtggaaacaaatttgagaactttgtgaccacatgaaaagtaatatacatgcaactaaaagctagtccctctattttatattataagtcgttttaattttttttctaattaaatttcttttggctttgataagtttatgaaaaatttaacaacatctacactaccaaactagtttcattaaatataacattaagtatattctaataatatatttcttttgagttaaaaactttgctatatttttctataaacttagttaaacttttctaagttaaattaaaattttacttaaaaaagtgatttaataatataatgaaatggagggagtagtagcaaacgaggaactaggaatctaggagaaacagagagaaagcggatcctctccgttgtccattatcattcttctaaaatctttcttcttcctccgttccttgctcccttcgttgcatagcttcatggccggctgccattgtcggcttgcagcaaacttcaatcgcatcatggccgatgcagaaaacggaaaggggctcgctgcagggcaatctttcggcctcgtgacccacgtccctacaccggcctccaccttattggcctccgaatcgagcggtgtgactgcgtgaacagagatcatccatctcatatccacggaacgatagccgtccacgcgagtagagtttgctgatgacatggggagacgataccaggtgcgtcgtcaaaatgtcagcttgttaagtattcccaccgtttcacaatctaagtcattctagtatttcccacatttatattgatgttaatgaatctagacatatatatttatttagattcattaacatcaatatgaatatgagaaatgctagaataacttatattgtgaaacggaggaagtaccgatgagagtccatcaaatggaataaatgcccatacgggagaaagtgatgttcaaattcggtggtcttataccctgggtaagatcgtgcaaagggagaagcttcaacaataatgggatacaatttttcttgttgcaacagcaatctgcctaagacagaagctgtagccttaaaagaaaattttcaacatgcctacaccttttgagcggcagaaattgcgtgctttgttggccaagagtgacagccatggcggccagccgtgaagctacacagaaacagggccaaggaaacagaggaagaagaaaggaattggaaggacgattttggatcgtcggatgataacgaacggcggatagagcagaactgtacgtctgtgactttacaacccaaagtcagaggatctagatcagtgtagaaaaaagttgccacataagtgagaaattgggaaaagaaaaggaaagaacattcatttgagtccgtagttgcgctttcaaacccatcacccttctgcttaagatctgaaagctacaaaagaagttgtgcttgaaatacaagtcaaataaattatgcaacacaactataattctgacagctacgtgacataaacatcaaaatattacattataaaaacttggtgacatggtatggccaaacatggaggacctatctgacacatgaaatggtagatttgacaaaggtaccacttcaactaaacaacactctcgctcgggcagcaaagggataataagttaggctctcctcatacaacataggaaccacaggcataacctttgggctcacactatttagtgccttcacatattggtgtctggaggacaacagattcttccctgatgaggcacttggaggtgtagcaaagttctcacatggagccatagatagtttccacggagaaaacttcctaggaacatcttcgcatctggtaatgtggcacttaagatgacctccagtgcgctgttgctgcactttaggtgtggcaagtgacacctgatcaagtgcaagcaagttttcaattgtttgatcaaatggattatataaaccaagcttcctcccagtattcagcagaatccttccatctgtaaggtcaactgccataggcactacaacattcgttgcaagtgagtaatctggccagaattttaaattgattgtgtatgctctagtccatagaccatgatcccacttccatatatctaactcatctgcaactgaatttgaaagaacagcacacaactttcctagaagctccaccacaaatgcatggcagcgacttctggggtcccacattgcaatgcttgaagggcaagggatgacttcaaatatcttagcggcaatgtcaaaagacacaatggctcgttcataactctgacccaaccttggttcgctcatccagtacagcactccatccacagagacaggtggcatgtcattcacaggcagaggtggctgcgggagttgctcgaagtatccagaaccacagctccatagagaacatgttaaagaatactcacgagagttgtagtctttccggtcatagaaaatccccacaacaacatgatcctgaatcacctggctgaaccccaaaccaacattcttattgccaactgcaaaaggattgtcttcttgttcacggcaacccgtaggcattttccatggttggtgctgatgccactctctgttccagtagaccctgtggtaacctgtacacgggttgaacagatagtcctcctccacgaagctcatcaaattcaatccacggcaaggcttggagcaaaccacctttgtgtcaagaaacagtgtgccttgattggatgcctcttgaagccatttacttaagggaacaaagttgaaaagtgattttccagagcccttacccacaagcatgatttttggcctcttgtccatgttcttgtgtgcaaagtatgcacggataaatctttcactctttatcagcccaagccattgcttacagactggtttgaacttcaagactgattcagccgggagtcggagtaggatctccttagtagccttagacaagggagttgcgaaggcaatctcttcccttgttttatgcactggggtaaggcattctttaaataaactgaatctaatatcagatttctcattttgataggatgtgcaggtctccgagattgaggtaatggtttccagagttctagaaacaggatcataggaacaaactttgtgcttggatgtggcgatgattatcttcgtacctgatctgcaactaccagcggaaccgataactttcactatctgtggctcaagtaaatccctaggcaactgccctgttaaatcaattcgatgatccaaagaccaatcaccagagttatagtccttaagcttccaaatttccaacttgcaaacagcagttgacctatcacgaaggtctcggaccatacacagattaccatcaagctccaccaaatgcactccagatgccacaaagggtggtgatcggatccatctgaaggtttcatcagtgagagaaaatgataaaatagaagctcttggtagtttaacgtgatgcaatgggttgatcaaccagtgcagatatccattgaagaaaagtggctgcagtttgttcatcaccgcattggaaatagcagaacgagcaaaactgtagaaccggaaaggtactccaccagcggcaggcctccaaatatccccttcatcgcccccaagtgtgtatatctcacacttcaaaaattccttctcaagcaagttcccttcaaaaagcctcactaccttgtacttcttcgtccgggcatcgcacccaagaccagcagtggcaaaagccacatctcggaaaggcggcaaccgtgtgactgcccgtgtggttgcattcataacatagtaagctggggcaataccatcatacaggagggagagaccatggcatggtgcgggtgtcacctccacatagtttccgcgaacatcatcaagcgtgagcagcaggtcatcggtgggcttcgatggtgagcacttgtacaccgcggtggagttgaaatttgccgtaggtgagacgaatagcagcttaggagctgacgacatctcctcggctctcgctgcgtagagttgaccaaattcctcggaagacagcattgcgtcccaggagcggcaggcagcccggaagcgaaggatggatttgacgggcaaccgcaggcacacctccgtcagcaactcgtcaggtagcatcgcggccgcatgacgggatggtacagatttcctcctcctcctcttgcttcccggggccaacgtagccgtctccggcagcacggacctcttcctcttgctgtcttgctgcatcatgttgccttcaaacttgacgaccctgggtctgcggcggtcgacggtggtggggcatatatagcaccgggttccccccggctccgatccgaatcggactgttgcgtctatttccgtctcggcttctgcgggagaggggccaaaccgccttggggaggccgtgccccgaagcgaagcaacgctcccctcgccgtcgtcgagccgccgccccgacgaggaggatagatggaggggggtggcgctaccggccggaagggggagggagtcgcccctcgatccgagtcggacggcgctcgccggccacgccgcctcccgatccgtgccggtgggggtgggaggagaggagggatggtgcaccgccttgcgccgtcgtcggagaggacagagaggagggggagtcgccgccgtgggatccgaggtcgtgctgtacagccagatccgcgccgctggtcgtcggagcaaaggaggggtggtcgcagccgtgggagaggacggagatgtgtggttcgccgccgtgggaatctgggagccgagtgaagggagagagagccgggggggggggcggggggggggggggggggaggagggggttcctgccgttgcactcatccatgccacacattttttaacaacggctgtatggagtgaccccaccacagtgattaattaggggcatctaatcaatagaattagttgtttctctcctggaaaaaaatcaccgatagaattagttatttctctcctggaaaaattcaacgaatacgccgtggttaagcatgtgaaaacattagcaaaagctttaataaatcactagtaaacatgcacgtgcaacgcacgtttcccacatcatatcacactaatcatgttcaatcacccaaagattatagcatctttccacattatatattacactgaacatgcaaacaaactaagttcaagaattacatatattgtagtgtaaattgcaatatcttaataactcttttgtagacactttttatataaaaaaaatgcaaagcagagaacgatatgaaatgtacaatgttgtcacagctttgatatacactaagctcaactctatctatagcatctaatcatgcacttacatcccaccactgatgtaaatcacatgcgagacacacacaagcaacttaaagtaagcaaactaacacaacgatctaaaacaacgacttaacaagtcactctaattcttccgagcatcggaggtcgattgaaggttctttcggctcgtcttcatcatcttgagttgctacccactcaatcttggaatggttgcgtttggattcttcttcttcatcatcacttatgatgatgaccggaggatctgcttgagttagggcaacttctttctccaccacacgaacctttggcgccaattgatagcgagggacaaatagagctctcttccttgcggtaagacgaattctggccttctgcggtggcgcttctcccttcaatgcggctagttccttctccaaacgatccactttgtcttctagcttgcaaatcttaccacgattccggtcttcacgatcttgagctgccaacacaatctccgcacgactttcatccatagcccacagcatctcaaccaaatgccttgtggtagcatcattctcaattccttcagtctcaaggtaactgccacggtcacttccctggggttgacgaggatgatagcgatactcagtatcggccaactgatcactataacgatcgcggagctctcctatggcgatccttgccacctcctgacttgcatggatgtagtttcttcctccagcttcgaacatcactgaggggatatcttcactattactgttcaaggtgactttgactcggcacttctcttcatgacgatcatgaggaatctgggcataaaaaggggcagtcccgaatccaatgacaaaggacattgtacgcaactcctggacaaaaccctcaacaccaaacaagtactcaggcttgtagcgcggcatctaaagacaagtgaaaggagggagttaagacatttatccaattaatagcacaagttttgggattaatttgaataaagtttagaagatcaaggtaaaaggtaattaaataaagtaaaccaaacttgcaagataagttgaaacagttggaaacaaggccacaagttttgtacttttgaacaacaggttttaaaagaaataaaagaaagttataaaatcatcatgctaaatttattttattgcagcaagattaaataaaacaatattgtaaaacttttgctggtaaaatgagccattagtacagtaatagatgtacagtactaataacactggaataaatttttaatgagaaccattaaaagagattaagaagtgcatgtgccattagtttggtttaattaaaagagaaagggaggagaacagttctacttttccaatatttttagagggcttctataggtaaccatttggcataacctagggtcaaggaggctctgataccaacttgtcacgcccggaatttctatccaaaattccaaacgcttacatgtgtgtgaaccctcgtccaggaatcaaccgaggcacacaataacaaattgataatagagtacaattattactctaatagcgaataaaatattattacagaggtagatagttcctctcaatcaataaagatctaagcagcggaaagtaaaataaacggcgcagacggctccactccacaggcagcttgaccaagactacacctaatcctccacaccatcagcttcattgaagaactcttcctctgatgaatgattgcaaggtgagtatatgacatactcagcaagtcacgcagcaaatatgcaagtgcacaaggataccaaaggatggcataatataggctcatttgcaaaagcagcatttagcaaacattggagaatttaataaaacagttaagtattaaacaatattaaaccaacactatacaacataccctgttgtataggcccaaccattctgacaaccacacccggctgaacagatctattctccaaaccaggaattaaacaaattattaccaattaaagcatcatttactatggtgagaagtgtgggactaatcacgaaagacattgctcgacccgcccataaccgcgggtacggctattcgaatagttttactctgatcagaggtgtaccactgtacccacaagacacagccccacatcatgtcaccatgtgccttagtaccaccacggtacctcggaaaggagctgtgacattacctctcgcacaacacaatccactacagtgcaccgttcctggatcataatctccccctcaaaaccagaggtaatggactccccagcgacccccgtgggcttatctccgccacttctcagtctggtgctccgcaatgaaccatgctatacaaaaggtaaagccgttgcccacgctggcttgtggttggcacgattaatgtttcacaaccgaaactcgtgaaccggtccttaattgtcatgagcacgactctcaaaaccatgtgctcacaacccaccattatcaaattttagttggcaagtaattaattaaccaatcacgattaaccatcgtgaactatcattaagccattattaaattataatgattcataagttatcccaaaagtgaactagtgtttctaagcagggctaagcaattacatctaacatctagttgaaccaatccaatatataaggttcaaccagtcaaattatattaacccaaggtatcaaggaataaggtaaacaagaacaatagggccataacaaagaataggttgattccacccaatgacattcgaaaataaatgcaatagttgaatagaaacaatagctttaaataggatcaacatgctcaaagggttgtttgggatctgtgtgacttgccttgctggccttggaactcttcaaactcttctccggcgaaaacggactctccggaaacgacggaatctaagcagaaaagagcaaaatcaccaaaacagcacataaacaagcatgaacagtacatgtggatatttttaacatgtagatctcaattttagaaaaaaattagagacttgaaccaactaaatcggagctaagatgaattagttatgaatttttaaagattatatcggattaaaacacttaaactgattttaattgaattatgacgcaataatgaattgtttttgaaaaggaaaagaggatttattgcgtcagcggctagggtttgcggtggaccgggcgcacgggcggcggttcacgcgaacggacggccgagatcgatccatctaaaacggacggccgagatcaatcgggtccacggcggctcacggcggacggccccaataacgtcagcgatgacgtcatctatggcggcggcggctcggcggctcggacggctcgggcggcgcaagctcaccagcgaacggcggcacgaggacgcaaacggagggcaccaggacgaagcggacgacacggcgaactcaccggcgaccaaaacgacggcggaaacccaacggacggtgacggcgacgaagaagaagcggcggagctcttcgggttgacggcggcgacgatgctccagtagtctccgacgacggcgaagcagcggacaaggacggcggcgacttggcgatcccgacggtggccttcccgagcgacggcgacggctggaacgacggcggcgcacggctggagcgacggcggcgacggctgagctagggcgcacggcgctaggactcttccgacgacgagaggcgaaggcgaagggagcgacgggtagaggagagctcgggggtccttttaaaggggctcggaggcggcggcgaaggcccacggcgaccggcgacgagaaggaaagatcgggctcaaagccgatccgagtcgacctcgaacccatcggtttccaaaccgatttagccgaagattccaaaggagaaaaggtggaggagatcccggagatcgtttcccctctattgattcggccggagaaggaaaggaacggccggatttggaagggaacggcggcggcggcgcgctagggtttcggcccgaggaagacgacgggcctgacaggcgagacccacctgtcagcgacaacgcgctcgcgcgcgggcggctgcggctgcggactgggccgacttgggccgaggagagagagagagcggttttgggccgactttcagcccaaagccaaaagaaacttttaaaacctttttcaatttaaattatttcttaaatgcaattccatttattaaaaatacttccttagctcaaataaatcccagaaaaatctaggaattatagaattaagcaaagtatttaatgaaattttatctggcccctttttatattggaatttatttattaaaattagatcttcttttcaagacttgtaaaataaattctaaaaattccatttaaacaacaatttataaattttgaatttttagggtgtgacataatctcagtggaaaaaagcactttgctttgcagcaaagtctaagggggagttgttccaagcagcaaacaacacaatttctataaattctcttataacaaatggttttccccgtgagaattgaaaaaaaaaataaagaatcatataaaagtattcagacatgaccagagcaaactcgcacaatgccatcagaacaacctacgcgcttataagtcaatagaaaattgataggtcatctaaatggtagccaaaggaagcataatatggaacgttggagtatattggcaatttagatgctttatttcttgcggaagagaactttcagcttatgccagatgaatagcaaaggtcaaattaacttcatgtaacactgcacaacaaatacattcttcctacaacattctctagtttgtcaaaagtcatggacatgacatgcttttaattaaatataccgtacattcttgcatgtatcaatagagttattcaaggtagctgctggtcctgccacccaataagggttaatttttactgttggtgtgtgtagcatcttgttacatgttatattttataaaacatttagtcaaaatgtcaaataatgaaatggatttcctatggttaacataaatggaacagattggatagagagagaatgcttaatggtatggttaaactcatgaattagcctgcgaaattgcatgaaagtgaataactcaatgaacaatgtacttgaccatgcaaaaaatgcctaattagttatttccaaagccacggcgtattcgttgaatttttccaggagagaaataactaattctatcgttgattttttccaggagagaaacaactaattctattgattagatgcccctaattaattaatcactgtggtggggtcactccatacagccgttgatacaaaaatgtgtggcatggatgagtgcaacggcaatgtttgccgtttgctccaaaggcagacgatgtgaactcggggggaggaaggccggaaaagtgatttttattttttgttttggattacagggtgttaagtggaaactttggacctccacctaaattgaaaaaaaaaagaactgaaataaaaagtgtcagggactgaaatataaaattaaagctacacctagggttgagaaaatacttaaagtcagacgtccgatcaacggataaacaatcggacgcgtcggacacctgcttgtatatttcagcctatacgaactacagagtgtaccagtcaatagcttctctatacatcttttcttttctcattcacagttatgctgcacatgtcatgtcatgtctattcatacatgtccacacgtaattttttttactcatctccacccttttctccgcctttaaatgttttttctcctaaaataattatccaatctataatatgattacatcattgtattccttacaattaaatcttaacaacaagatatcacacgattatattttgataaaaaatcaaacgatgtttcacccataataaaagtttgtttcagttcactctataaaatgttttagagaaatgcaacatttaaaaatacaggctgcaacactagcaaccacttatatgaaacactgagtcctaatgagtgaaacaaataaaacatatcacagatacaatatatttgtaaaaacccgatattgttgaaatatttttatatcacatatgaacactaaactataattattgaaacattataaaatacttgctaaaacattctaggaacaccacgtgcaacatttgcaaattaaatagtgaaacaccatatgaatactgactgaaacatttaaatataataggtgcaacatttgaaaaattcatgaataaagctaaatatttttttcatcggattatagtcatgtttggtcttattttaaagatttaattgcaacgaatttagtggtgcaatcgaatcatgaattggagaagtaatttaagagaaaaaatagtttaaagtttgctaaaaaaaacttaaaccaacctaacttttgttttctagtatagatgcatggcttcctacgcttgcagtgggctgcacctggtgctggtgtgtctgcatgtgttggcggaggtggaggtgagcgtccgatttttagctaaaacatcggacgtccgatccgtagtcacctccctagggttgtgtttagttcacaccaaaattggaagtttagttgaaattggaataatgtgacgaaaaagttgaaagtttgtgtatgtaggaaagttttgatgtgatgaaaaagttagaagtttgaagaaaaattttggaactaaacacggcgctagagtcacttaatttagcctatgtggcattataggactcctctaatcagaaggacaattgttaacgccctgactacttattactccttctgtcccataatataaggcccccatgacatgatttgtgaacgatgatatgtaggtgattctgaccgtctcttggtgaatgaccaaatcgctccctaggaggtgattttggtcttttcccttcattgtgaacttcctcacctccttgcttctcatacttattcaaaagcatatcgaaggtcaccttagtcttctttggagctttagaacttgaaacttcactcctattctccttccaaacaccaacctccggattctttggcaccatcatctttggcctaggctctccaatgaccacttctttccccttagtagattcagcttgctccagccgaatcaacacattcttatcattaaaattaattgtattcaccggaaaaggatcatgatcaagcttcatcttaaaaccatcgtaaatttcaatcgtccttcatctatggccgattaaacttgtcgtcgaaacacattgcaatcattagtagaatgagaatgagaatcatgacatttacaataagctcaacgttttaattcctattgagattgtatgacatggcctttaggtaaccttatttgcttttcttgcaaaagataatcaaaaatcttatcacatttggctacattaaaactatacttaacctcaccttgccgatctttacgaggagtcggcattaaattagaacaaacaaaaggcttatttttgttagtccataaccactcagcaacatacatatcatgattaccattatcattagaatcactagcctcatcccattgcgctaagaattgacctacatgctcttatgtggtcctactatcatcaccactaaatttggtaaattcgggaactctatagccatgaggatatgggatgttatcatagtaatcaggttacggcttttggtaaaccttagcatgattcctagcttcaatcccgaatttatccctaataataccactaatcaattcctctatattctcaggcctatgctgatttggtggtgggtttggtggcataagaggttgtggttgcggcacaatataattatattggccatacctagtattgggaggatatcttctagtaagatcattataaatattagggatatgtgggggaacttgaggactaacagtagatataggggaatcatgtgctggaatatggtataaaagcccattatttgtcattggatcaatcccctgtatcgggataattgcgccggtctgaccggtccaaggcccggtctgaccagcatccagaggcgcggtcagaccgggaaagaacccggtctaaccggccatctggccggtctgaccggcggtaaacgcgcggtcggaccggccatctggcccggtcggaccggctgaatgcacagcttatccctcaccggttgtttgcatattcgcccccatcggttttgttgtatatttgatcaacaagggctttgctagtactggtagaggctttagtctgaaaatcggctaaaaaagaaccgaatttattcctcataaaatcttcaattcgcgcatcaaaacgagattcaaaagatgcatctaatttattatttgaagcaacaatggatgaatctattgtattgccacgagattttggataggaattggtacctcttcagcacctaccgaatcaaaagtagatttaggcaacggtctaggcttgagaaccacaggtcttggtgcacgatctcatcagcatctcctgcgtgaccgccttgatgtgctcctccatgatcttgtgtgcttccccatcaagatcctccaatgagattggcatgatattggatggttccacctctggcttggtcattttcgtcatggcggcgtcgaagttgagacgacgttgagctgatttccccagcggagccgccaaaaatcgtgttggcaactttttgtgacaagttgacaagcacgatcgcagcacctaaagctttgcggtgattctagagtcgccaaccacctcaatcaagcaaaagctaaaccaagatgggttttaataaactaaaccggctagcggagcagatatagatagaacgatagataactacccgtcttgtgggcaaaacggaaggttttcagaacaaacctacaaagaggtgtcgcattctcgcaacggcggcggacgatttacaacgcaaatcgacaaagatggacaaactaaactaaaactagaagcaaaagtaaaagaacgattcgattgattgatagttgattgatagattacaattaaaccggccttgtcccttatataggggttggtcttgccctctacaggccctcctccacgttcgactcgggatagaatccaaaggaaacccgaaacatgccttcccgagcaaggaaacctcgagacccgacgaaacagactcggcttcagactttggcggtcagaccggccacacaccgccggtttgaccggcccactgtcggcggtctgaccggccaacatacgacggtcagaccagccttctcagcggaaaatcggcagatttccaaactttggcaattttcctattttattcctaggtgccaaatttgggtgtaaacagatattatgcatatttctctattagggccaatcaaacataacgtaatcatattgatgaactactcctacttggatgtattgtccttctctaccagaacaaatgccaagggagtaagttgtaatccggcatcaatccctattccctattgttgtgagcaaggtaccctttgaatttgcctatgagcaagtataatagtgctataagcctactataagcttatatggaggagagatgtaataaaaagttaagggtgttggctctcatgcaagagctagcttaacacaagctccaatacaaatacaattaatgtataagtgagagatagagagaggagaagaaaattgtagccaaccttgtagctaatctattatatgtgttagctttaagatgggctaatagtaggaagtgagctctattattatctttgctctattaagattggctaatagtaggaagtgagcatccttgctctactaagaaagtttcatcaattgctaataccagccttaagttcttgaatgtcgtcacacattgcccgaaaatccatgaagcatagccaaatacacacctcgagactccatctatcaatcttaactcaatagtttcatatttattttggctcgattatgtttcgagccgagatataaaaggtttaggttttagatatgttaggcatcttgtttggatgtcatcgaggatggggtgctcaaaaagataaataggtggtcaagctatcaattgctcgaaaagtaacattcttgatgactcttgtttttctatttatcgttgggtagctctattaagtttggcggtttcatgagaggaagccctcctgtctttcctaattggttcttagttctcaaaccttggacattgttgtttatgccatttgcccatcggacattgctcaaatttgttgcaaaagtcagaaaaggctatgatcacaataaaactattcaaaattttaacttgtacaacagaaactaaaatgggcagtgtcttgtgataatttaactcaggtatgcaaaaaatcaaatacacttgtttttaaggataatcatcaggttgagcccttattgagattctttctcttcgtgctgcatcacacataatctgtaagattatcaaaccaatgcgtttcaagtgcatcttgtattcccactctcaagttgtatcatgttgttggcaccattgatgccaacatgaagttgtccataggctagcaattttaagggtcatttatttggacagaagctttgaaaaacatatacacctattttcaattttcgcaacaagttctgtgcttattgttacagcttccaatgataagttgggtacaacttttaatctatttttcagatgaacatacactgtattttctaggtagaggaaggggcatctggttgtctgtctgggagtgctgcttgaaatgctggatgtttcatatactcctcatggagcctcgcgagagtgggataatttaactgccaagaaaacatatttcattagatttaacaaaatagataaaggcatatgcatggatagagtaagaagcacaagaacagtaccatgttaatttgaaaacgagtcactgctgcataaatctgaggtgcgaggaatacgtctgcctgcatgtgtaacggaaatgcaacagttactgaagccaaaacagtgcttgttaatatttggagtgttcacaaacatgattacataaacaaagggaaagttagtaaatggcaatctatggttctcatgaggagtacagtgaatatgaggatgcatttttattttatcacttcagttttttcttttttcacatgggagaacttcactctgttttagggaaaaagtgacacaatttgcaagcaagatacacgaaaaaaaaaaaaaccttagagaagatctccatacaagaaaggataaaattgttagggcagcatacacaccaatcggacttcatctcctgttgcatacttcccagcacagccttttactaggttctcagcagctacaccattggggaacgaagtgagcatggtgtgacataaaagcaaatctaaataggcaggaatgtgaaaaggggaggaatatgagtgagcttctcacaacatgcaaaacaactgagttatgcataacacattttttttgaagcagatttgatggtggaagtaaagctgcaaaatatagtcatttgattaataaaataaaggatacgtcagtgaggagaacctgcgaaacctctgtcgatctgttgttgagtccatgggatgctctcccctgtaccaaccttcttctcaatgaacctctgcaaagaaacaagtggcccgcaaattattctgttatacaatatttttttccctaattgagctgtactatattaattttactacagaagcacaaactgtttaatatagagttaatctgaggcacaaaaatgcatctttgcacaatgcagccagatagacatggaacacaggtgcactgagtaatcaaataccaggcagagaaccttacatggcagtaagaaattgaatgcaaatcagttcttaccagtacggtaagattgtgaagaggttgaattccagagcatacaatgcttgctatctgccataaaattagattatgtcatgaaaggtcacactaggcatgatcaatcggtaagaggaaaaaaaatctagtgcatacagtaagctatattttctggattatgcctaagcctatcttatatccttgtgctcagtattcctattatcctgaaacatgtgtgggctgatcctttcctctttttgttattgttctgatgtgatcttaccttctcaaataggcactaactgaacatcaacgctgctcaacctcaacaaattacaaatagcacttgtatatcaaatggaatgtttaattgaggtcatcatcctgcgcatagcagtgcagaatctatcattacctggagattcaaggccttcattttaaggtcttgaggtaaaagagggtgctcagggtacttgtcctccaaatactgcaatcacatagaaacaagtcaagaagcggccaattttgatgctataaactactgcatctcaaaattctgaatgcttactaatgctatcgcgtaagaatcaccaattacagcatctccatcgaccaatgccgggacgaacttcataggattaaccttcatgaattcttccacccacaaacaaaaaagaaaatagttgaggctaccacacatgtgttctatctttcggtttgagtttcctgttttttggttcctcccctacgattctgagctagttgtgcatgggtgcgtgccacgaatgggtggacatcatggcgcatcgtgtgcgtatcatgcgtccagttacaagggtactaaggccatgatctgcatatatcactttgctttatattgcatcaagaaaatcccgaaaagaggcgcttccacatgctgcaccgaaacctctcatgttcatctcaattttctcagttgtgcatttcatcgaacaccttcctattcatcttcccccacagagcctagccttgtggatttcgggccgatcgcctgctagaatcttacctctcaacatccaagcacaaatttgcggcggtaattgcacgaacagtctctagacgcagcacaaaaccgtacacaagtatagatagggggaggaaagcagtttgacagacaggtggcgtagcacctaacctggatcagagtgctcccccttgagcaggttcaccgccttgtactcgtactccaatcctgcaggagacagacatcaaaatcacccgcacgcacgcacgcaccaggttcactcactctgcccggccatgagccaaccacgcatagaagatgacgacgagaggaaggcaatcgcgcggcgcgggcacaacgtacctttgaggttgagggcgatgcggacgcggtgcgagcacgagctccgccagtacgagtacagacccagcttcgccggcgccaccgccgcccccgccgcctccgccatcggaagccgccgccgccgcctccgccgcgaagcgtacacgtcagcgagcgagcgagcgagcggaaggaagaagacgagtggtctctgactcttctccgtgggccacgagacaaaactctagaagagcccatcaaccgccccgacaggtgggccccaccccacccagggtggaaactgggatttcgttttcgtgctagccccctgtaattttgtttatttgcgtttaggtcctcgtctggacctggctgcgattttgcccctcctctctaatcctctctcgctctccactacgaggccaccaccaccaccactctcgctcgctccccccactcccactcgcctgaaaccctagcaaggagctcccggcggatggacgagggaggcggcgctggtgctgcggctgccgccgccgggaacgcggcgggggcggcggtgcaccacaacgcgcggtccgcggaggacgtcttccgcgacttccgcgcgcgccgcgcgggcatcgtcaaggcgctcaccaccggtgggtagctctcttcggtgttgtttgggatgctctttgctgattgattgattgattgatttgatggatttgctgttcttttttttgtgtggttgtgcagatgtggagaagttctaccggcagtgcgaccccggtgaggctagctccccgatgttcatgtgtttgagctaaattttttgtgtttggggatgtgaggctttggtcttttttgcggctgctctggagtcgcttttgctttttctggatggacggagcttagtatggttgcgattttagggtttgctccagtgtttcttaaagttccttaaagctggaataattgattcctcggggaaaagaataaaagctcgaataattggttagttgtagccctaactaatctgtcttagttatggcggttttagtgtttatcggtgaaagctttttcttcttagctggtatcttgcagtcgcttgccggtgtaattgggtccatttaagtcagtttgttagggggtagtttcaggtttcagcaaattaaagtacaattgttgttgcggtttgcactatcagcatctgggacctcagagagcatgcttaaatgatgattgcattcaaaatactctatatgaaccacaatcaatcagatgtggtctttaaataattaaattttcatttgattgaagctagtgtatcagctcagtgtagaggctgcaaatcaaatcctgatcacatcgtgctaataactattctcttttccagatcgatcatcatgtaaatctatgatctggttattggaccgtaggattgggaatctggttgaaaaattttaacacatttttaggaaaaggcttcatgggagttattctagttggccatactctttctccagccttgtgtaatcctcactgcattttattagcaaacaaaagttgttttccatggtaaaaactgtgttttgtgagacccatgacccaaaactcagggttttctgaaatttcctcgaagtaaatatttttagtaaagaaatttcatgaattgaagacagaagtggacaaaaaggtatatccaaattcagttactgctggtcgcctggtcctatctgtaacttatgttagcatgtagaggcatgtattcatgggcttggcccacatcatacaggactgattaatcattacaattttcaaggcccattaaaacactaaagcaccctattctacaggcccaacagcatacttacattgctagggaaccattgaagcagcttctgctagcatgatccaaaatataagttaattgtaattgtatactgtaatcatatgatcctgggacatttaacttttggccacttttaagatgtggtaattaattatttgccgctcgctgtctatgacatgtgagccctcatgtgtctatgacatatgggtccagtggcaaatcatttatcaccatccgtaagagtggcaaataattaattattcccaaaatgtaagtcaatatgctagtatactgtaattgcatcattactacaattaaaggtgaaaaacaacagtagctccaaaacttactgtcctgttgatgtttgaagacgggtttaatgttttaggggttacgtgagaataatttgttttgagtaaattggtttgtcgactccctaggcatagccccagtatgtgcttcaagcgtgtgtgggttaatcttcaactgtatgtagccattttgtgctgtactgtccattgaaataatgatgaatggtacattacatcacaagtagtctgttgaatgaagttatcttcccttgtttatgtcatagtaatgacatagtgatctcctattttttcagagaaagagaacctgtgcctttatggattgcccaatgagacctgggacgtgacccttccagctgaggaagtacctcctgaacttccagaaccagcactgggcataaactttgctcgtgatggaatgatcgaaaaagattggttgtcgctggttgcagttcatagcgatgcatggctactgtctgtagcattttactttggggctcgctttggatttgataaggaagccaggtttgcatagttttcgttgcagctgtcgatgcatttcttatttacagaaatcaactgtgatgaggcattctgattccatttgtcaaagtttacaagaggatttttcatcttttgtgtaattatctgagtaatattatccagtgcattgtcactcaacaatcaacattatattgtttggtagaaaatgacaatagtccataactggcatttgaatttcaggagacggctcttcaccatgattaatggtcttcccactgtatatgaagttgtgacgggaattgccaagaagcaaacaaaagtctccaacggcagcagcaaaagcaacaagtccaaccctaaagtatgtacatgtgatcatatgcatgtctaacatgcattatctagcgcccatatcaacacaacgtttaaccttttcgtttcccttcttttccagccatcgaagcaatccaattctaacagcaagcctgcaaagccacctcagccaaaagatgaggaagacagcggcccggaaggcacagaggatgaggaccaggcttacatgtgtggcgcttgcggagagacttacgcgaacggtgagttctggatctgctgcgacgtctgcgagaagtggttccatggcaagtgcgttcggatcacccctgcgaaggcagagcacatcaagcagtacaagtgccctggctgcagcagcaagaggagccgagaatgaccacgggaggctcccggttgacatgttttagaatcgttaggaattggtgaagaggcggagaaccgcttcacccgcaacctgctgccgtgcagcagcagacccggcgtgcaggccggttgttgtattagtttcagtcattgtgttgtacccgacatggtaagtagctattgtatttagcaggcaggcaggctaactgctgtggtcgtagtgtgatgtgaacctctatgagagagttggatactctcggtgttcagtagtgattaagttatgggttagtgtgtatgattctatgataactgcctcccctttcatgaggtttctaccctgtcttggctcctttatttgttttttttttttgtgggacttttggttgctgatgttcgacagttcaagacttgacaacaccagcttcttggacaagttcaggaacccatcgtcaagtgcatgtctttcttcaagcaggttcgaaaggaaaagaaaaaacagagaggcagaaacattgtatatttgtagatagattatatgtgtgagcagaacaacaaagaaatacactatacaatacaaaccattactttctatcagtgctttaggccccctttgaattgaaggaattgaaattctataccattcatgcatttgatcctgcatactagggtgtaattggcacggtgttttgatcgatacatgcgatgtaattggctccattgcggcttgagctctctctctctatctatctcttgattttttttattttatgaacttttatatttctaatttttaaaacaaacattttcaaccctattctttttagaaaattgaacctgttgatcacaccagccgaactgtggtaaaacaatagtcacactcatctgaatgacgtgacgacaaaactatcgcacccgctgtgggtggcatgacaattttattttgtcacgtgtggccaaaagattcatattttgaaaataagttttgaaaatatttatgtttgtaaaatttaaaaataaaaaaaggttcaaaaaatactaaaaattccccctctctgttcctctctgactctgcgtgtgttatttccttgggctttgtaaggcccgattcaaaacgggctggaaccacgcatcgcatactactaccacttgggctttcgtgttggtgtgtgtgtgtggctgtgcgcgtcgaggagagagagagagagaggaggaggaggaggagagcggcggcggcgatggcggggaaggggttgaacgcgacgggggagttcttccggcggcgggacgactggaggaggcacccgatggtggggaaccagctgcgccacgccacgccggggctcggcatcgccatcgtcgccttcgggatctacctcgtcggcgaggccgcctacaaccgcctctaccgcccctccggcgaccaccaccaccactagatcgcgtcggcggccacgcgcggagacccgcgccgcctccccgaggtgagcgcccccccggtgtaaaagctccccttgttctcttcctccggctgaaatgggttcgtttcgttagatttgggatcgatttggaggcgttagggttgttcggaagtgctcaccttgatctatctattggagattatgtagagctttttcatgtgaaacagattagtaatttgcatattgaaactgtggcgcggggttggactggctagttgttcgtttgcttcccatgacaattcatgtttgcttttttttttttcaaaagattaggtgtctaattacatggtgaaatatttcatccataggaatactaagaatgtatttagcacgtacgatcggtggagaacaaaattcttgagaaatgtatatactaggtgccaatgaagtctgaacatcattggttctagtcttagcattcgttctgccgtataagtatatacctgccctaagaagaggcatgttgtgccaacgaaatgtatattgatttggtcatcaagtcaacacatgtggatagcacttggtaagataactgactggatggctggatgcctttcccctttagctgcatcttaagctgtgatacttgaaaattgcatctttaatctaggtagatatgttttactataaccctaactagactatcatgtgaagcatgtttctgtactatatgacatgttgccatctatgttggagcaaacattattcttttctcagtcctggttgaattcactttaagatgcaaataagcttgtttcacataatttagtatcaccttttttttcttcccttttctgcatgatcattgtcagaatcttatgtttttcaccttctaatgtgaacttaagaacttgtcagtgcaccactatttttgttgcattgtgttagatacttgagttacatagttaggaggtgtcctttttctgtgcattgtggtgaaatgagagccaacatccttgccgaagttactctaactttagcattgtttgctgtcacacgccactgtcttcccagacttccataagtcgattatcctctggcagattcatttgatcatttcatacggattagtgttttaatttgaaaggggcaacttctaacaaaggcatagttacattttatgataagtagttagatgcccatgttgcaacgggatcgaaagatagaaatatgattcagtctctctatacccgtttttcacaaagagttgggttttgggtttgtttagagcagttttttatacctctccttaatggaaatcgtggaatctatagtttatatcaattaaggaagtcacttcaaaatctggttttctgaagatgtattcttttgtgattaagctttttatgtatttttttttatatgttttgcatgcatgattagttccctccaacattgctcaagcacatcggcggaggagctaaagcaaagttctgcgctgtttgttgtcctatgtctattgcactccctggtatttccgtgattaattgcctaacaggtgtattatgtgctgcaggtgaagtggttggagcaatctttaccaagcaccaatgttgttgatcttttccagtttgagttcataaggtctgccatgaggcccatgaccatcatgtaatttgcaaccagggagacatgaatcatgtacttttatatcaatgttctgtgcttataatccagcatttggaaattggaagtgacacttataattctgaagttatgtgaattcttccatgcccttgtttgaattatgacctgcactacctgatcagtgcaaccaagataactttcagataaaaactaccaaatccgcgatgcgcttgattgatcagccttgttggtttggccttttttatatggaagtcagcaaggcgatgatttctgcgttgcgtcgcataatctgaacaaaagcaagtggcgtgtgctgtacactgctattgaacagatgaatgggttgtactcctagaagttagtctgcacagggcgtgtgttatttgtttatcatcattgtaaaatactagtactacatttcatctttctatcagaagaagaaaaaaagaactacatttcatttgattccctcagcctccgagagttgtgcaattctgacgttgggcgtagcgagtacccgtctcccctgcgctgtcctccatttctgctcatcctgtagctatcatcctcactgccgatttctctgttgctgtccatagcatccaacaatctcgcggctccattgctacccctcctgaatctcccattcatgccatctccatcgctacccctcctgaatctcccattcatgtcatcgatgtactctctgttgccaatgttcatcctagctccactctttcttcctggcttccattttggctcctccaagtctgaggcgaagcgattaacaaaccgatctcttcttccatcaccatcgttgcctgctccactctttcttcttggcttccattctggctcctccaaatctgaggcgaagcgattaacaaaccgatctcttcttccctcaccatcgctgcccctcatgtacctcctagtcctctccccattgttggtattagccatatatttcagctccggtctatctctgccattttcgcttcggttcaacctgttctgagttttccattttggcatcaacttgtgatccattccactgtctgaatttgaaccaaactcatcatccgtccaaccctttctaggaacattcctaccgccttcgttggggggattccacctcctaacatcattcgttgtgcgccctctagtcgtggatctccattttggttcaaaaccattgcgtgttacctcagagtcggagaatgaactgccacccaccactcgatccttcccaatggcgctaccgccatcggtgttcaaggccttccttctccctgcgggacgtttccctctactcccactatttctctcttgccagctttgaccaagatgatattcacttgtgccttctggttccaaagagaagccattgccacgctgatccctaacaccatcgctaccgatggctacagatgttgtagcttcccaccttgccacattatctttccttctatctctcccaaccattgctctttgctcgggtcgcaaatcgacatcccccatgtcctccaagtccgaggtaacaatgtcatcgttccatccaccgtcgctagaatcgtcgtcgtcgccaccatccaagttactcactggctcccacactccacccctttcgatgtactcaaccgcaggctcacgatcaccaccaacaccacgcatttccttcttggccgcattctcacgaacaccttgcaggcggtggcggtgactccggtccgtcgcatcggaagggttaccgcgagcagccagtgtgctctcaaggccaccattgacaagaccgtagggctgaacgctatggacggatcccttggggaagaagcgcgcggaggccctgccggtgtccggggccgcgaagacccgcggcccgtcgcggtcgttccagaggtcgacgccgccggggcggtggaagcggtcggcgagcgccttcatctggtcgtccgccgcgacggagagcaggttgggcgccgccgccgcggcggcggcggagtcggaggcgtcggggtcccaggggcgctcgaggtgcgcggcggcgtcgcggagctcggcgcgcttgcgcatctcgtagagctggcgctcccgggcgaggcgcgccttgagcagctgcttggccttcctcgcctgcatccgcttccactgccacttggagacgccgccggggaacgtgcgcgggccgccgcccatgcggatggcgaggtccccgcgccggagcggcgcgcgcgggcgggcctcgcagggggaggggacccggagtccgcgtgaggagagggagagcgagtggaaggaagacaacggcggcgccaccgccgcggcggcggcgaggagcggcatggtggcgcggcgcgaggcggggatagcggcagcggagaggtggagtcctctcgaccacctgaggctgaggaggagggagagaaatgggaggatttttttttattttttttttgcttgctatctgacgcgcgcgcgtcacgacctcaagcagcaggtgaaagccttccgctcaccaaaaaaaaaaaaaccagcctcttttcccctccattttttttttgccctgtttagtttccaaaaactttttcccaaaaacatcacattgaatctttgaacgttttcccaaaaacatcacattgaatctttgaacgtatgcatagagtattaaatatagataaattaaaaaactaattgcacaattagaggggaaatcgcgagacgaatctttcgagtctaattagtccataattagccataagtgctacagtaacccacatttgctaatgacggattaattaggctcaaaagattcgtctcgcggtttccatgcgagttataaaattaattttttcatttgtgtccgaaaactccttccgacatccggtcaaacgtccgatgtccaaaaattttcttttcgcgaactaaacgggccgtcatggttgatcttggctgcctagtactctcgtgatagcaagtgcagaactttggtggtaatggatcgtatctgtataattcgatacttgtggacctcggctttgtctttgttgggaaaatttgaaccatgccatacaaattttgcaaaatttatgatatgccaccctgacccatatgtcattgactcatgtgagtgctacatgtcattaagatacgggtggcatatcttaaattttgtaaaattagggtgcttgtttgtttctctcctcaagaatggttgcttgtagaattgcctatttatgtttagttatgatagtgtacgagtgtaccattggaatgagtaaagcatagtacaagttaacctaatcattttgaagctgtgatgattagctgcaggttagttggcttgagtagtgccagtaatgtttttggcgtttgttcgtattgcatacgtgatccacaactggggtgtgataaatctgtgcatttgtttactgttggaatcattatatgccaccaaactgtatggttgtttacagtttgaagccaggttaggctctgctggtgttccatccaaattctgataattatggctgtgtttagttcagcgtaaaatttagattttggttgaaattggagatgatgtgactgaaaagttgtgtgtgtatgatatgttgatgtgatggaaaaggaatgaagtttggatccaaacttaggatctaaacccagcctattctgaactctgaaggattggcttcagagtttccagcatctatcatgactcgctgaacgcggtgcggtggtggttggctgtagtacccatcttttagttctatcaatgtgagtgacttaggcctctgttctttccacaagtttcccaacccctttccctcgtttttcacgtgcacgcttttcaaactgctaaatggtatgtttttttgtaaaaagtttctatacgaaagttgctttaaaaaaacaaattaatccatttttgacaaaaaaaattaactaatacttaattaatcacacgctaatggaccgctccgttttccgtgcggtggagttgggttcccaaccccaagtatcaaacacagccttaatgtgacacaagctatttctactcacccagaaaaaatttcccctttggaaacaattttgcatttctcgtatgtatagcttatgtaatctaggcaataaagcatctcaatggacatagttatatgcagaatcacagacagaataggaatttggagtttgaattcttcatagatactagttttactatggctatgtttagatccaaagtttggattttggatctaaactttggtcttttttcatcacatcaacctgtcatacacacataacttttcagtcacatcatctttaatttcaaccaaaatctaaactttacgctgaactaaacataaccataggtaatcacagaactgtctcttaacgcggttttgcatctgcaggagaatgttttttagcagagtcaaggatgatgatcccggactgccatataatcgacttggaactccactttcagatctgaaagcaactctggtactagtgaatgtgaaatacaagctgctactagtgaaattcgaaatttgcaaccattttcttctccgtttgcaggttgaattggacgagtcaaatgaacatgatgccgagattggagaggctttcttttatgccgtagatgaagatgaagattaagttaagtgttttacgcaaaacgagatgatattaacgtatgattaattaagttgtaattattataaacttgaaaaatatatttatgatattcaactgcttttataaagaaattttttgcatgaagcatattgtttagcagtttgaaaaatgtgacataaatatccaaattttcatctaacttttgttggagaaagaacgggcctgagggtacaatcacagaagtcgaaactgtattctcaagctctcacttttctgaaataccagaaagaatctgagtttcttgacgtcttgagttgagtggctcttcttctaacaggacgcattctgtgaactcctgaattatgttttgctgttgtgaatggaatattgcttgcatgatttacagtctccatgtgcagattacagtcttactatgtcagttgtcgctgcctagtgcctactctattaagtcaattatgtctattatgtcaattatttctagtgcctagtgcctagttgtcttattatgtctgttggagttgttgtcagtacatactctggttaatctgcaattctgcatgtttgagtcagttttctattaagtgctgaaacgttggcggaattgctggtcaagcattggttaatcagagataatcatagtattaaaaaatgtttaatcagacatgattattagtcagacgacgaatagttgtgaggtgatgctgagatcttcatttctgaataccttgtggaatccggatggaatttacaagattctgaaaacgaaaaatcctgtgggagaagacaaggtcacgaatcccgatgcagcacggagccatgatccaaccgcgcggaacccctccttatctgatcccgagattcctctgcccccgccgtcctggaatcccacgtatcccttcccaccacggaaaaaaaaaatcccacccaaaaaaaccaaccaaacagagcaaaaaaataaaaagaaaaagaaaaaatcagctcgaaaaaatcactatccacaccccacaaagatccccacgaaaaactctctcacacacacactctctctctcctctctctctctctctctagactccacttcccccaatccgcgcgagctcaacctcctcctccgccatgtccggcctcctccggtggaggcgcctcgccgccgtggccacgcgggcggcgtccaccctgaccgcgccggagtgctgctccccggcggtggtggcgccgccgcaccggcgcgtgcaggaacggcgcaagtgggagggccccacctcctcctcgtcgtcgtcgtccgacgagcacgagccgcggcgcatccgcgcggaggcgcactgcccgcgctgctccaagcacatggacatcctcttctcccaccgcgcgccgccgtcctcctccgccgccgcgggcgcgggcgcgggcggcggtgggtaccaggcgctcaacctctgccccaactgccgcagcgcctacttcttccgcccccacctcctcgcgccgctccagggcaccttcgtcgagatcggccgcgtccgcgccgacctgctcccccacgacgccgtcagggccaggggcgcttccttctgggaggccatccgtgggagctcgtcgtcgcgggacgacggggacggcggcggcgtggccgtgcacgtgccgcccggcccgccgttccaccccaacctcaacgtcgtccgcgtcgccggaggcggtggcggtggcggcggcggaggaggaggaggagcaggtggtggcggtggtggtgaggagggtgcggggaaggacgggtggggcgggtcgaacctcgggaaggatttgcctacgcccaaggagatatgtcaggggctcgataagtatgtgattgggcaggacagagccaagaaggtgaggaaattttcttccaattttgttgaatttgttccagtgcacttatctcggttattattacacatcctgattaaaatcggttagttcgtgtaattaaaaacgtgaggtctttgttgaattacatcgtatctagttcttcgcttgagacactcctacgccgcatttggttgtttacgagtcgcgatggcggcgagatttagcaacaaagttattgagctagctgtgttgattgtgatgatgctttggggctttgctttcagtaaggaacaatatttacttattggcctgttaagctatctcataaaattgatatctttgcaaactggtttttaaatcaggggctcaagtgagcttctactgttttgacactatcaaggaatgattcagaacttgatttatttctttagtcaaatttgttctaatttgcaatggatgaatcacttctacatgtctacttgatagctgataacaaacacgtagttttgtacaaaatgtatatagaacattgatttggactgctgatggtgttcgcattcaaataaacccttatttccacacacttatccttggtcttcattgtccaacctaatacacttcagattccgtacataattttagtacatatagtgttaatgagagtgataaatcaagtgttggtattttctaaatatcactttctttctcaatttaatatatatttgtcatgagttgcgaaaagcttcacctcgatatatgttcttgttcatcaaactcagatgataagtcaacttcaagtcttttgcttagtgttgcattaatcaacagtaacgcctctatacttttgatatgctgatctctcacagcctgttaaatctacaggtgctatctgttgcagtgtacaatcattataaacgaatataccataaatcattacaaaaagggtcagtttctttctaccaccttagttgttcttcttgttcttggaatgatgaagctcgtctattcttgcacaagaacaattaggatcgatgaatatctttcagtgactaattatgtggtatataagctaaaacaattaggtctggagcagatttgggtggttttgatggagaagctgatgatgacgatggtgttgaactagagaaaagcaatgttctattaatggggcctactggctcaggtaagcatttgcccccaaattcaaagttgaatgttgatgtaatgggaactgtcaattatttcttctacaacactagatcaactataacagagagggcactcagcactgtttttttggatactttgtttgtttcacaggtaaaactctacttgctaagacattagctcgctttgtgaatgtgccatttgtaattgctgatgcaacaacattgacacaggcaagtctttactaacttttaaatgcataatgtccaagcacacatctttatgatttgagctcattacttgcaaaagttaaaatggtgaagccattaaactatggaaagatccattatatgccaccacgtaactgtgagttcaacatttgcccactggatgactgcatattccttccatgaacacctcttgactggggtgaagaacatgagtgaacaaattccacagccgaccaactattggctcaaagtttatacccaaacttcatttagttgcatacagctgcaataaaaccacctccattacctttgcattgggtacatcacttttataagtatgagctgccgctttgaaacatgatgatgggagttggaccagactaatgtaggtctggcttggcagcaatagagaaaatgagagaacagcatgcagggcatgtctgttagtctcatgctcataggtgctaaatggccttgcaaccttaacagagagcaatcagactgagaggacagagatttcatagaaggaagaaattgaatcctgatgccatggaaggaacacacaattattcaatggcagttcattaaattcagttattcagtgaaaactaatggaatttcccttacattaaacagcaacaagaagtatcatatacagccaccagcccatttggattaagttcagagtgatattgtgaatgatcattcatttctatttgctagcatttgcaatcttcatcagtttgttttcccctttttttaatatcatcttagttccaaaagtaaagcttaactcctgcgctttcctgcaggcagggtatgtaggagaagatgtagaatctatactatacaagttactggcggtatggttcttagcttacaaattggacctgcttattctctttacaccatgcctttgaaagtgattttggatactctattttcaatcaggtggcagattttaacgtgcaagcagcacaacaagggatggtgtacatcgatgaagttgataagatcacaaagaaggtttgtctttgttagctgaatcagtatgtcttccttggtgacattaatcagctgacgtgttcaacatgcaggctgagagccttaacattagtagagatgtctccggtgaaggtgtccagcaggctttgttgaaaatgctggaaggcacagtaagtgatttgcattgatctccttatggcctggttagcttatgtgtcttttggcatactgaatcacaatatataaagtgaaaccttaataagcagatattgcttaccctctactcctctaggatctctgtgctttggatacagattagtacatcataggtagcatcccccggcaaatgaaacaacatagtattagtagtgtgcgcgcctgttcagtagtactgatgcatgatcctttgctttatgctggaaatatttcagtttgagctttttcttgtgatattgaacacatatggtacaagtcatcaagttaaaaaaaaattatggtaatccatctagtgacctatttaaagggaaatcattttgcttatttggctgaaatatatatcatatgatctttctgggatattttacttctaagcaaatcagaacttacatggacgtcttttgatacttttgtgaaatgttgatatatttagattgtcaatgtccctgagaaaggagcaaggaagcatcctcgcggtgataatatacaggtactgtcacagtttatatattacaatcttcaaaaataaaatatttagcctttttgtgccggaataattacaccatatcatttttatcttctgctgaatgatagccccaagaaaaatacggcaagataagagttttgggtgttccatgactgacaatagtaatagagaacaattcctttgtctgaaatatccatcccctggataggtctcatcccaaatgctgctttatatgaacatactattgttcctttataccataaatgcctggtctaaactagtgcaatttcagattaccaactgcccagtaaaaccttgagtttgtttttctactcgttcagtgcttgtggtatgcacacatggattaacttcaattgtataatggtcttcatgccatacagatagatacaaaggacattctttttatttgtggtggtgcttttattgacttggagaaaactatatcagagaggtattgcatattgatctttgagacttacctattggaacaattgtctccaatgttttctcaaatcgtcatctaatgtatttgcacctgctttaatttttaaaaatcaggcggcaagattcttctattggctttggggcacctgtccgtgctaacatgagggcaggtggcatctcaagtgctcaagtgacatcatccttgttggaatcagtaagcaccaaaattccgagtttaacattttttggaaatctcctttgtttaaggagaatgcatgtgtgaattcagtgaaattactgtgtaaaaccttaaatctaggtgtttaaactgttcatttcttaggttgagagtggcgacctaatagcatatggacttattccggaatttattggacggtttcctatccttgttagcttggcagctctaaacgaggaccagcttgttcaggtaatccaatcatgtactgtttttctacctagcatcatcttgtgatttatttatgatatcttaccatgataaagcttatagaatgctgtaagatatttatagattttaccatggagcactgatacaatcatgttctgttaggttctcatggagccaaaaaatgctctgggtaaacaattcaagaaattattcagcatgaataatgtgagtatatctgtaatagaaccatgcaaattaatgtccccttggtatctcatctcaaccccaactgtggctttcaggtcaagcttcattttacagatgctgcacttagaataattgccaagaaggcaatgtccaaaaatacgggtgcacgtggtttaaggactatccttgagaatattctcatggatgctatgtacgaggtttgttatgtgacaaattttcttcctttatattgactttacagtgtagacataaactcaatgaggctgacaccgttctttttatgttttgctgtgccttgcagattccagatgcaaaatctggtgagaagcgaatcgatgcggtggttgtagatgaagacgcagtcggagcagtggaccaacctggctgcggagctaagatcctttatggcgatggtgcttttgaacgttatctctcccagataaaggtaaggattcttaattctacaaactgatggatgcatatgcatataatctgcaactataatattccttggggaaaatactgcaggtagcaggggatgcagcgggaagcgaagcggatggagaagccgagctttcctcttcaagagccatggggatgtgatttattggttctcacatctcctgtataaccctgtaaaatctaatcccagatgtaataatgtaagtattagccttgtaaaggaatattgtgtgtagtgtctattgctagttaaaaaggctccagcgcaatgttcagcacccccacgctctttacttaatttgcagcagggtttggaaagagtatatagctcaggggatatttatgggtgtcgtacagacaaccctggttgtcatgaaaatgtaatgtccaagaattgtgatgactgctgatggatgtaaaaaaaaaacttagaaacaatgaaacgcattgaaagggggaaggaaatgccaataatgctgttgtcaaaatgttggtgttgttcagtgtttacgtgatagtggagcccattttggaaaggcagaggaaaatctggaattttacaggactgaaatacaaatcttgtggaaatgacttttatattttgcatgtttctcgatccatgttactgagttctttatactgcaatttctcgatccagacagactagtctatgagcaagtttaacagtacagctcactactagctccaatttatctatagctaatttaatagctaattcatacaatggttgcttactatacaattaatacatggtcccacttaccatatacacactgcgtcttggagtccgtgctgcagctgactacagatctgtagttcgctgctcttctctctcatcttttatctcattaaaatatgtttatagctggctaatagtctgctattgtacctgctctaaacaatatgacgcatatggtcatacatatatactccgtagctaacaagttatcattaagatcgtaacacaagaaattgaagagttatcagttatcaccaacgcttaaggtctgcctggtagagctaagccaaacgagataaattccaaagttgcactctggaagaacttgagaagcaggaaaatccaggagcaacctaggacaatccaaacaaactgcacagtaaacgttcgaatgcggagtgtaagtggttaccatgtacaaatgtggggaagaagggggggaagtgaggaaaagatgacatgatctctgagcataagacgcacaaatccgtgtgtcttcacaacatcagaatgactacacaggctaatcggagaagatgacccccactccacttctccatcaaaatacacagtatattacagatatatcatctatgcgtccagcaacaacatgtagatcaggatggtcattctagaattcagtgtcgaagcaagacgtcatcaccttcgaaacaaccgagcgtgcaaagggtatatagcttagactgtacctgcaaataccaacatttatagcttgagaatagttctatccctgtgatcgtgcgacacttataattaaccctatattgggtttatatgctgctatcccatttatagcccgtaaagtgtttcagcccatgttaaagaatgaggcaatattactttggcgatttacagcatcacctattcatgtacagaaaattagaaatacagtacgaaacatgtttgagcggctggctagctggagtcaaaagttatgccattatcctagttaaacagatgactaaaaaccatccagtggaagctattcaacttaccaaacaagagcaccaaattccaagataatggcaagtagagtcagcagcttgctgtgcacctgtaaataaaaaatagagccatttagcatattatacaattaaattgaagcatgatacaaaactaatttacacctgttaaatttaaaattgtcttacaaagagagcacagaacagagcaattatgatgcttgcaatgtatacagcagttgcatatatccgcacagaatcaagcatcatgtcaaattgccttttgggacctataagaaacgctgtactgccaaacaaatgatcccatcattagttgacatgagtaaaaaaagacttggtggcttcaaagataaatacctagcggagaaatggcagaatattacagtcttgtaagcatgtacacatagtatttttgtaacggaaaatatcataccatggcaaagttaaagtacaggttaacatttatgtagacataattcaacaagttgaaaccccatctataagaaaagaaaaaaaagagcatccaagatgagaatatgattatatgaagagcaatagagtttgtatgtttgcattgatatgcgaatgtgaacaacacccatatttcttgaagtttacatcattctgattttactggtgtccaaaggcaagtaataaaataacttgaaaatagagtaagatggtatattaaatggaactttgaaacagaccttccaagtgccatcaaattgccaagggtgaatgttaccccgaatttcacaggattgaagaaaacaagcattgactgcaatggagatcaaaaatatcaaataacccacagtggctggagggaaatgaaaatcaaacacaacaaaaattggtagacagagaaaatctgaagaataaccaacaatataataagaacagcccttagtaaagttgcccaaaaaaaaggataccctttagtcccaaacaagctagagtaggctgcaggaactagactagagatgaaacccaagtaaaatgtgaagtacaatcatgtatatattattgtgtgtttcccattatctaaaaatatattattgtgtgtttttcttgttctgccacagctagatcatcagaaatatcatgtgatacaagtattagtactactaactgttgtacgctgcacggaaattacacagcttccaacatttgaggtatttatttgcgctcccaaaggcaaaaacagtaccatagaaaatggtttgagaactttatgttaaaaaaagcatggggaacaattatgcaccctgtcctactattgaaaaaggatggttactgctaactgtgtgaagcatgtctacggcaatcagatatattgaactgagagtccaagaccaaaaacgcggcattacgacaattcgaacaacatgaatcaaactacggctgcattaacatactgcaaggatgaagtatcgtcaatcgtcagaaagcatggaatctcattgctccctacattactttgtaccaaaaaaaaaatcaccctgaagtggaaacaaacagatatgtacagcatcaaactgtgaaacttaccaagaaggtgcacgtcaatccggcagccaagcatatcgcgaagccgtacagcctctgcaccgagattccaaaaaacaagcaccaggatttcagcacgatcagtcaaccgcatttgctagaacaatcactactcgcgtcgaccagatctgagcgaggaacccggatcgatccgggctgggtgggtggggtggggatggagcttgcctgggtggtggtgagggcgcagttgcgggtgacgtcgtcgaagaaggactgctcctccggcgccgactcctcgtccacctccatccccaccagcatcctcgcccgctccagcgcccccctcatcgtgtccatgccccctcgccgcgccgcgccgccctccgccacccccgcacagcctgagaagagcttactccggcgagctcccctactccggtactcgacagcgtcggccgccgatcccaaaatccaaaaataaataaataaaaaatctctctgaaatttctcccttctcgaagatgaagacgactcgactagtagagtcactgaagtggacagttggggaggagaagtagacttattcaagccgcaaagcttagtgggcccggcccaattttgtgagcccaaacttctcgcgtgtccttctcgtactgggctgggctgggctgggattcaaccgaacggggccgtcagctgttcgttgctggcaacgcgaaaaaattgggaggcgcgtggcgcgcccccgcggcggcggcggcggcgcgcgctcggctcgcctctcatcgcgcgcggcgcgcactggcggcgccgaggaaaccctagcgccgcatccgcctcctatatattggacctgcacctcgcgccgcgccgcgccggaggcagagacaaccactcttctcctgacacctctcgccgccgcgtctctctctcgctctctctccgacacagaagaggagcagcgcaatgccgcgttccgccgtcgccgccggacaactgctctcgctcgggtgggtaactgggtatatgatcttggatgggttcttggatcgttcgttcttgcttggtttcttggattctggaaggcattctgcgaggtcactgatgacgtgatctgttattgtgtgttgcagccgccggggctacgcggcggcggcggcggcagagttgcagcagcgcggctcctcgatggcggcgaggatctcggcggcggagggtggcgccggcggtgcggcggcggcggcggcgtcgaaggagatcttctggatgagggatcccaagaccggctgctgggtccccgagaatcgcttcggcgacgtcgacgccgccgagctccgggcgcggctgctgtcgaggaagaactaggcaaccaatctctgatcgtaattcgagtaatttctcgatccatgaaggaaccaatcctgccaaaattcgagcgatctgaacatcgtttgaaacggatcacactattcttttgatagttgatacgattatgccttgtgttgtgcctcaaagttgatatgaaattgagttcgagttcagtttactagctacaaccatgccgtcttcctgaaattgagttcaactgcgtgaaaattgtgaaacgtagcgttaaacatttgaccgtccatgtatttatgtttcatatatacatacccaaattcatatgaatgttagacaaaagatggaaaggccgaaacatcttataataggaacaaatggagtactgcacaaaagaatcatgatggttggtcacgaagatttcataaatatatataattttggcacttcatccaatatgtctcaccaaactcggaacaaatcataaccagcatgagtaaagacataatttacaaaaatttgtgaactatatagatcaaatatcaaggtactgaatggcattgtccgcaaggaccgcaacaatacaaaatataattatatatgatttaataactaacctccatataacaattttctaatcaccggcaaaatgtagttcgagatcaccagttgcaacttgcaattaaaatttcataataataaacatataagtagcaaagtgttaggatctaaattaagctccatctctcctgaacaaagcagaggttctagcttagactctggacctcatctccttcggccggccgacaggaggcctcctcggtgcgtcaaactctcccttcacgtcctcctcgtcgccgccgccatcgccatcaccgttcttcttcttctccggtcggacggcggccgaggacgtccccttctgtgccgatatcgccgacgccagcgccaccggcatgaggcagagccccttgctctgcaggtactgcatcgccgtcgtcatgttgtcctccatcagcttcaccacctcctgctcgaacatggcgccgccgtccaggagctccggctgatcgccggggagccctcctgttactgctcctgctcctgcctgcctttctcctgatgatgatcttggggacaggagaaacccggggctctgcatcaacagtttcagtgagtgcattgtgattaacaggattaaccgcttcctgttctttgacctgattgcatcagcagtggtaaacaagttagaatgttattgtgaattgattttgttggtttacctcggtttgtgtttctgtcagaagagggacaacggcttcggccgctccaagcctgctcatgctaaggaccttcaaaggacagcaatggcattagtacagaagcagaaaatagcttgtcaattgaaacaaacatagctgtgaaaacgagcggttgtggtggcacgcaaaccttgacttgtaattggagaaatttcacatagtcgatgatctcatcgagcatggatgccttgttagtctgcacaacagaaaaacaaattgtcatctcagatcacaagcatctcaacgaggtactactaatctagcattatctggtaataaagaagcatggcagtaagtagactaccttgtttgagtttgggacaagctcctgtaaatccttcatcctgtcagagatcttctccctccggagctacaaacaggagatcaccacagagtcaaacagtctgctgtaatccgttgttctacagttcttctagctgaactaaccactggaattcaagcagaacaagaatcacatgaacccactcaccctctctgcgatgctgtggggatcggtggcctggcctcggcgagccctgacacgaggcttgggtgctccattcccagcactaccactcccattgccctttggtagcacctcagataggttcacaaatggagcggcgccgccatttttgccaccgcaagcttcagcaggctgtatgcacaacagttcttgctcaggttttcaggacatcagatattgcagaggaattcgactgatttactaaaagattggcaaatcaagatggacaaggaaggacaagaacctgtctatggctctgtgttgcattgaatgatgcgagtggtccagaaatcagcgaggagagattgaggtggtgcaggccactgctgaattcctgaaaaaaattgcagctcaggttgttaggtaaactgaagtatcagggtccgattctatctcagcctttagctaactaatactgtaccgtgctgtgctgctttatttagatagcgataaatcggcactatatattgacttaacatgcagatctacttagaagaattgaggtcaagcatgtcgcataaaacaaaaaagacaaaacattttattgagctcatcctcaccttctggtcgatctgcaggctgtcaatgctgggggtaacgtgctgctgtccagaagcaaaagacatcaattttccagtgttgaaatcgatgtcatcctgcaattccaagacattaagggcatgtttagttctcaaacaaaatttttcacgctgtcacatcgaatgtttggacacatacatgaagtattaaatgtagactaaaaaaacaaaaccaattacagaaattgctagactaatcttttaagcctaattgcaccatgatttgacaatgtggtgctacagtaaacatttgctaatgacggattaattaggcttaataaattcgtcttacgggaaaagtttcctcgcggaatttgtaatttgtttcgttattagactacgtttaatacttcaaatgtgtatccgtatatccgatgtgatatgcatgggcaaaaatttttgccaactaaacaagccctaaaatgttaccactggcgatgaatgatgcttttacatggtaaatgtcagattcaattcagggttcttgttactcacattcagatgatgcggctgcgacgaaggcacaacgcccagctgctgctgctgctgatgatgatgatacttgctcacggtcgcctcctgcaggagatcgccattgaagaggctgccaaagccgaagctctgcggcgtttcttctcccgcggccatggacgggagtacacctcccgcggcgtaggccgccggcggcacgtgctgctgctgctctccgacgaggaagccgcctcctgcaggcatggcggcggagtgctcgctcccgctgctgtcgttggagctgctgctgcagatgaccggggggccgccgctgtcggtgagcggcatggcgcacggctccagcgcgccgagcatcgcggcgccgccgtcgtcgtccatcgcggcgaagccgaggccgtcgccgtggcgcagcagctcagcctccagcagcagctgctgctgctcgtgcagcctcgccgtactgggagacgacgcggcggtcttgccgaggaacgcggcctcctcgtcgtcgacggcaccgtagctcaccaaagcgtcggcgagggaggagacgccgcctgcggcccacggcgagccagcgaacacggcgtcccgcgaccacgccggcgacggcgtgaaggggtaggcgaagccgcccattccgatctccggtgcaatccactgaacaaaacaagaacgaaaaaattatatatatatatatatatatatatatatatatatatattaaaaaaaaactcctttcagtgactagaggaagaacacaaagaagaaggtcatttcaagatgcctaaaaatggatggatcatggttgactacaattgaatttgagatccatagaacaacgtttttttaaaaaagaaaatgattgctagaagcaataaataatttatccatgtggtactcctaagtatagatcattatgcatggcctcattcatggtcagacaggtgatcaagtttaagagagtgttgagcaagttgttctactcagacagaactacatctttgtttttttttctttctccgggtaatctggtctgacaaattgcagtcatatggaagatactactactgtattagtatcatggccctggaaggagaagaatctccaagaactccttactataaaaaaattgtctaactcgaccgttaatttgcatctgatataaagaaatgcatcaatccaaaacaagtcaaagaggcagtacacaacactgcaaccataatgcaatgccttttttttttgttggtctgaacctgaaaaaaattcagagcaataaaagagaccaggccaaaactgattatgaaatctacacctctaatccaagcgaggccagatagatttgactaatctccccgttccaattgggatcaacagcattgtaactaaaacggccgtatgttcatcaggaacaagaacggactaattctgaatatccttgaaaaagggaaaaaaaacattttcaccgaaataacacgagctaatcaatcctaccagtaaggactcccccaaaaagaagaaaagaaactgccgaaaaacgcaattcactcccctacagctcccgcacccagatcaatccccaaacaccgatacatgcaagaacagcagcacaccgagtgagctcggaattccgcatggatccggccacccaattaggcacacagaatgaaggaactggaagcagagagagagagagagaggatgagattggcgatggagctcaccgggtgggggcggtgacgacggctgacgaggcgaagtcggagggcgacgtgcggcgaggaaggaggaggaagtgctgtatatatatatatatatataaccgccgcgctccgctttgggcgggggaggagaagaccgggaggagagagagtatgaggagggagggaaggaagacgaggcggcactgcactgcactgcactgctctcccgtctctcgactcgcgtcgcgcgctcgccggttgcggttggtgcgtttttgtagctgcgcgcgtgtgtgatgaccgtgtgtgtctgtctgcgtctgtttgtgcgtgcgtgggtgggtgtggctgcttcgcttgttcagtgcgtgagcgtgacaagtgtgcgcaggggcaaagctccccagccggcgaaaatttaactattgatggcggtcttttaaactcgtagagttatgtcacctagatttctaaacaattaaaatacagattcagaactcagaactcatctaagtgtatcatttaggtctcaaattgatatagctcctttagtatcttacgtgatgctgatgtggcatgccacgtgaacgtggcgtgtccttttttttttcttcctttcttctgcttggagaagaaggagaagaaaaggaggggaaaaaagaaaaggaaattttttaaatgtccgtgtggcatgccacatcagcaccacgtaggattctgaaaggactgtggtgatttgggacctagataacacactatgacaagttctaggatttgtatatgtattttaagagtttagggatttagatgacacatccctataaatttaatgaccgcccatgcacttcactctttaactatttatccctttacttgtctttttttaataaatgactgtcgtacccttctaaacatatgtttggttattcatcttatttaaaaattttatgtaaatgtataaaatatactccctccatcctaaaatataacaacttctagctcataaggtttatcccaaaatataaaacttattcaccaacattttcttctcaacctatcacaacattctcccatttatttttatatactttcttaataccctagttaaaccttaaaaatccttatattctgggactgattgagtaaatcatgcttaaagtaatttgagtgataaaacaactcacaacaaaataaattataattacgtagttttttcaataagacaaatggtcaaacgtgtggcaaaatgttaacggtgtcatctattaaaaaacagagttaatataacaattagtaataatttatcatctggacccatacgtcattgagaaacagagataacaagtagttaagtgtcccgctgggcggccttggtgagttggtggtgattatatactcatccggaccaagaggaagcaaccaagcgatcaggtgataccacccgatctgcttctcttttttccttttctttgcctttttatgcgtcacatatttatcctatctaggagtggatggtggacagtaagctcgtggctcattagctcgctcgcctcgtgacgagctcggctcggctcgtttgatttcctaacgagccaagctagcattttatctcgttagagataacgagccagctcgagatgactcacgagcgagtcttaacgagtcaggactgcaatagacaacagcaagggcccagcccaaaacaacagctgaacaacaaaaccctaggcgcaccgcatttctctctgtctctagcgaatcgtccaatcctcgatccccttcaccatgcccttccgttgttccgcatccgcagtgcgccgccgccagtcgctagggccgccgccgtcgccgccgcacttccccagccacgtgcagtggctcggcgtcgccagccgctagggccattgccgtcactgccgccgcacttccccgatgtgccgtggctcggtgccgccagccgctagggccgccgccgcacttccccaaccagcgccagctgcaagaaggcgtcacaggctcgagaccactgtcacccttgctatcttgttggtttggctcgcgagcctaacgagctagctcgagctttcaaacgagccgagccgagctgggtttctagctcattaggataatgagtcaagccgagccagctcgttatcctaacgagctagatcgagccgagccgagccggttcgctatccacccctaatcctatcgattaacttagccacaataaacgctaaaccgtactactcccttcgagctgatactacttgtcgttttagataagggtgaggtcaaactttagaattttttattatgaattattttaaaagtttttatcttttaaatatggtgactacatgtatagattagtcttaaaaggtattattagttaaaaactatctagttaaataacaagtatgtcctataacccgggacagatggagtattactttagccaattacactgaactactgtaacattttgttttcgttcccaataggtccatttctgggagatctttttttttattacacgcatagctaccgctaaaaaggagagatgtataccgattctatacgggcgattcgataagctggtgatcgtttgattctctcacatctggacagcagggattcacaaagaaaaggttcacaagaactccagacagcgacgtcacacataagacataaccactttaaccttttttccagttctgagattagcagcatcagcgtcgcctaactctatccgcgcatgcggttttaattaggtttagccgaaagttggattaacgtaaatccgattgcaattagctagtacggcagtagggcagattcgtcgggttaagagcaagtttaatagtgtaggcaattactagctttaattcatctatagccaatttaatagtcaatttatacaatatttgcttactatactattagtatatggtcatatctgtcatacacatattgtgtcttgaagtctgtgttacagctggctataaatctatagtccgctgctcttctctcttatcttttattatattaaaatatatttataaccagctaataatctactattgtacatgttttaatagtttaacgaaggaaaagataacgataactagagcgcggctgccgatcccgaaaacgattttattctgaagggtagattcttttttcttgtgtgctccggagtccggagaaggcgcggcgtgcgcggcgaatgaccaaactgcccctgcatggtaaccgttggtaatgatggcgtgtggctgggccacctttgcccggtcaatgcacttgcagtcttcctccatggccggccggacacgggggttaattctttggtgttcaagtcatgtgatgtgattaggaaaaagaaatgaaaaagattgatatattacacgtgtatatatatatatttgagtctaatacttcgtttttggcttttttattaacaaattcacttctcaggttgatattaccttatatttctcgtgatgaattttacctgagtttttaagagtgcatattagctttgacatcatgcatataccatttacacaccctcaactgcgaaccattccctccgtataaaaaaaactcacttttaggtttgaatctgcatgtatgtccatatttaaactctagagtaatggatttatcttttcgcttatgcttatatttatcagtcaaaatttaaatttttaaccttaaatttgaagtaaattttaaggttttttttatcgaagtttatttttcagcctttgtttttacatcgctaagaacaaatacataaaagttttattcacaaattgctttttatttgtaaatataccgttttgcttattccgctgataagtcaaacaatctctgatatgaactcttggacagaaaggagctagaagatatgtgaagatggtctccttagacgatggataatagtgtgatgttagtattacgtagaaacatgtggaagaaagggaaatatgatagagaagattattggtatctgaattaacaggtggttaaatgtagagtttagcaccattagtagttttgtactgttgttctatagaatcgaaaagaagaactgacctcgaaactcctgtggtccgcggaccgctcatgtaaaaaaagaacagagcaagtagttatattgaaacagtagttatttctgcgaaagcttgacttggatgtgtgaccattttcagatcacaaaaatctgactaatctcggttaggattggcagaaagatgcacctagacaagacttttattactctagcagtgtattactgttaagaaataataggcaaacaaacgataaaaaacaatagatcaatcacagaagacacgagatttaatgtggaaaaccctctcaaagcaggagagaaaataccactggtgccagccagtaaaatatcttcactatatcgggatgaggttacaacgccgcacgacggcttacaaaaggtgtgtgtatagtggaaccctaaaaggtacacccccgggcgtccccaggtacacaacccaatgggtcagcttcagcctccgctccactacgacagaagctggcctttattaagtgcaaatgaatttggatcacaactcaacaaactccaccttgagacaaattccttcttgtagcatgaatcaatccttcaccctgaacacaacaaagacaaaaaaaaaacattttcggcgccaaacagcctcttgggtaaaaccactataccaactagcttgagcaaagttcaaacttagcaacaggaacagactttgtcatcatatcagcaggattatcatgagtgcttatcttcatacctttagcttaccttgcgcgactacatcacgaacataatggtacttgatatcaatgtgctttatcctctcatgaaacatatgatctttagtgaggtatatggcactttaactgttacaaaacaagttaatgcaagaatcaactccacaaagctcagtaaacaatcctttcagctaaatggattctttatatgcttcagcaatagccatgtattttatttcagtggtagactgggcaacaatatgctgcaatgttgccttccaacttacagcacaactaccaatagtaaacacataacctgtgagtgaccttctcttatccaaatcagcagcaaaatctgaatccacatatccaacaagccccttattagtcctgtcaaacttcaagcaagcatcagctgtgcctctgaggtacctgaaaatccactgaacagctttccagtcttctttaccaggattagccatgtatctactaaccaaactcatagcatgagataaatccgacgggagcaaaccatggcatacatcaaagaaccaacaacactagaatatagaactctagatatgtattctacatcctcatcagtactagcacattgcaaagctgataatttaaaataaggtgcaataggagtactaacaggctttgcatcatgcatgttaaaatgctgaaaaacctttttaatgtaactttgttgactaagaaataacaaacctgaatttttgtctctagtaatttccattcctagaattttcttagcagcaccaagatccttcatatcaaactcactgctcaactgtttcttcaatgtagtgatttcttcctagctcttggcaacaatcagcatatcatcaacatataacagcaagtatataggtgatccattaacaaatttaatatatacacacagctatcaaattcagacctcttaaagccatgtgacaatataaatgaatcaaactttttataccattgacgaggagactgtttcaaaccatataaggatcctttcaacttgcaaacataatcctccttaccaggtactatgaacccttctgactggtccatgtatatctcctcttcaagctctccatgtaaaaatattatcttaacatctaacggctctagctcaagatcatgcatagcaacaatactgaaaaatgtgcgaattgaactatgctttacaactggagagaacacatcattataatcaacaccagcaatttggctgaaaccttttgctactaaccttgccttaaaccttggatgctcgcttagagataaaccctcatttcttttgaagatccatttacaacggacatgcttcttctattttggcaagtgcacaagctcccatgtgccattcttctcaagagactgcatctcctcctgcatagctgagatccacttctcacgatcaccagaaacaccagcttcagtgtatgtagccggctcaagagtattctccacttgttcggcacaactaaaagcataataaaccatatcatattcctcaataagacggacaggagctccacgactcctctttgttatgtgatgtgcaataggttcatcttgtggctgcaaaacaggaggtgagtgttgaactgtatcatgaacatcattatcaacaatttcagtttcctgatcatccacgtgctctcgcccaagcctaccggcgacgggcctctgctccactatggcagaagctggcctttattaagtgcaaatgaatttggatcacaactcaacaattaccaggatcagtaccattactaggatcatacccctccggatcaaatggcatatgaactccctctatttcatattgtaagtcgttggaccttttctcagtccaacttctttagatttgatcaaatttataaaaaatatgctacctccgttttttataaatgacaccgttgactttttctcacatgtttgactattcgtcttattcaaaaaatttacgtaattataatttattttatgagttgttttatcattcatagtactttaaatgtgatttatatcttatacatttgtataaaatttttgaataagacgaatggtcaagcatgaaagaaaaagtcaacgacgtcatctattaaaaaatagaggaagtatatattaggattttcaacacaaaacaaacatattatcaaaatatatgcaatgttagatttgataaaactaatttggtatttttatattgctaattttttttatgaatttgatcaaactaacataatacgaaacggatgaagcactttatagtttctcatagatgatttcaatcgatggggacgtagctcatatggtagagcgctcgcttcgcatgcgagaggcacggggttcgattccccgcgtctccatttttttccccactttcattccgacttttaatcatatttactagctgttttttacacttacatgatgcacacattcataatgttttggtactacgtcattattaaagttacactcataatgtttttgtactatgccaatataaaaggttattagaaatacatgcatgcaagctaggtcaaatctatctattatatcattaataggaatagaaaaaggagcatctacgttcgctctcatggccgagaaattctcacattaatcggagaaaaagaaaaaacagagtccatatagaaatacaatttagaaatagctgaaattcgaaattaaaaaataaggaatattagaagaggagactagagtctatatagaaatacaatttagaaatagctgaaattcagaatttaaaaataaggaatattagaagaggagactagagtccatatataaatacaatttagaaatagctgaaattcagaatttaaaaataaggaatattagaagaggagactagagtccatatataaatacaatttagaaatagttgaaattcggaattaaaaaataaggaatattagaagtagagtatagagtccatatagaaatacaattaagaaaagaaaataaaaattcgtaattaaaaaataagaaatattagaagtagagtatagagtccatataggaatttaaaactaagtaaaattcagaataaacataataaaataaaaggtagtgtttagagtccgtataaaaatacaatttacaaataactaaaatttgaaattaaaaaaacatgggaagaagagtttaaagtcaatataggaatacaatttagaagtaactgaaatttgaaattaaaaattaaagaatattgaaagatgagtttagagtccacatagaaatacaattagaaataataaaaaatcagaattaaaaaaagaaatattaaaagacaagtctagagtccatatagaaatatatataatttacaaataactaaaatttgatattaaaaataattaataactaacacgtatataaaatacaatatgaatattacacattagtagttttgtaaagttattgtaaaatttaaaattatgttgtcattgtaatatattttaataatataatgagaaaatatatatgctattatatgagagaaaatataatgatgctagccgcgcaatctgcgcgggccatcatgctagttatacttaaatgatgctcatattccttattatgtttaggtcactctttttcatatatcggaatagaatggacaaagaaaggtgatgtggtattctctgttatttgctttttcaatcaaacttgcatacaatgataccaactttggctgttacttgcattaatctaaactaccatttgactgcaaatctgcattctctctctctctctcttcgttcatagcacaaacggttgcatacacctttctgagtctgctgctagatcgcatatgctgctcctaccacaggctcgccattcgccatggcgacaacaaaagcatcacttgcccttctgatctcgtctgttgtcgtaaccaggtcaccagcacgatctgcatcaagtgcgcgaggattagattagcatctggatctactggtttatcccagcataagcatctcaagtgttacatgctttacactacatccattccatgacgcctgtaaagcatacttgggtgcccacaattgttctgtcaggctcagctgctcgaagtctgaaggaatcttgcacatttctgcagaaagcttaccctgtgaagagagcacaggcaacataaccagctcaaattccaccatgacaagttaacagtaaggtacaattcgggattcatataagtcgtaacaaaattccaccaattcaccatgccaagttaacggcaaggtacaattcaggaaccataagtcataacagaagctactctgaattactcagcaagcgaaaaatcgaacactgatggggcacgtctccacactatcaaggttcaggacaatgctcctgatttccaagaacagacacagaataaggctaacattttgtcacataacaatcaggttacaatcgatgcagtattcgccaggacatggcagttgcatcatagctcagaccacagcatcacaagcatgaacaagcagctacaagttacacaacacccacaggcacaggcacataaccatataactatgctaccccttgttgctaataccgacgctaactagtactcagatgtcatttgttgctcccagaacagcctaaatgggaggtaattctaaccaccagggcaatgccaattaactgatacaatcatacaaatcgaattcttgaatctttcaagatgtaaaccgggtgccattactggctctcgtcctcctcgtcctctgcctcatcctcgtcttctttgttgtcggtatcgctaccattcccggtacctctggcggcttcggcggcattgttctcgttgtactggtgttgtggctgctgcggggcagcatggcagtgcctgctgtcctggaagcggtaccgaacatggtgattgctgctggtaccgacatcagtggccatagcggttctcctcgtgccattgccatcggcagcagcaatggcggtggcaacggcacccactgcggcagcggcagcagaggcgccagcattgttggccttggagagctccatctgcatcttgagaaagaactggacgcgctggtcctccagctcgcgggcggcctctaggcggtcgcgctccatccggagctcctgctcccgcttcgccaactccacgcgctcatacacctcgccgaaccggcggatcgcctgcgccagctcgcgcaggccctgcgtgcggtggccgctgtccgcaccgttcacctcctcctccacctcgcgccgcctcttgccattcgcggccgccataggtggctccggcgggaacccgtcggacgactccgacgacgctgatacctggggaggcgacggcatcctccgcttcaccccggaagaggggaggaactgcgtgcgcgtgcgctgcgggaagttgacgcgcggcgccatgggcgcggtgctccgggcggcggtagcggcggcggcggagttggagccggaattgcccgcgcccgcggccccggcggcggcggcggcggggtaggcgcccgcgggcttgtgcacgggggcgaggagggtgtcgaggcggtggaagtagggccaggaggagtccggcttggccttctcgaccttgtacttcttcttgagcgtgtcgatgcggttcttgcactggacgtcggacttgggctgcttggagtagccgtcgcgggaggagacgacctcggcgacctcctgccactgcgggtggcggaggctgccgcgccccagcgcgacgaaccgctccccccaggcgtcgatcagcgtggaggtggcgccgtcgctccaggcgtcctcccttccccctccccctcccccacctccagaggaggagccgggcttggggatggggatggcgagggcgaggtggcccgggggcgccgcggcgacggtgacggggtcggcaacggggagtggggacggggagcgggacggggagagcgaggacgacggggacgcgccgccgtcgtcgtccatggccgcagatctggcggccgcgccggcggcggcgggggggagggggaggcgagggtttggggatatttccgggatggatggatggacggaacggagaaggggaggaatccggaaatcaaaaatgctgtggtggccgccgtcgcgtccggcggcgaggggacgggactgcaacggagacggcgggctgtgttgggccggacggaattaatgggggaggggcctgtccgggaggcccgttaatctccggcccgcttgcgtgggtgcgccgagtttttttttgcagggatggaccggtgatatttttttggggaaaaagtacacccaaggtccctctacttgtcaccgagtcacagaatcgtccctcagccacaaaccagatatatgacatccctcaacttataaaaaccgtttactctagatccttcaatggttttgaccctaatttcattctacgtggctgctgagtcagtgtagaacccacatgttagcatgccacatcagcaccctcactcttccccctccactcccttcatcctcctctctctctcttctcttctcttctctggcaagccagtcggcgaggcaggagaggaggaggcggcgggcgatgaagcggcagcggctgcgatgcgacagaaggtgagggcgagcgctgtgtcgccgccgccggcgaagtgggcgccacagcgttgggctcggaggcagaggcagaggtgggggctaggagccgtggcggtagccgcggaggtggaggcgaggcccggcaccatggagctggactcggagccctggcttgctcccgcaccacatctccctttctccgcgtgctcgctatcaacctcctcacctccttcctcttcgcgcgcgctcgccgccagacagaggcatcgtcatcgttgttgggcggcttgtcattgtttcactgctatatccaacaatgtcagttgtccaattttctcttctctctagggcatctggcgacggacgggggtagcagccagtgacgggaaagggaagacacgtgtggcatgaccgcatgaccacagatgccgcgacggcctaggtgacggcgagcacacacttcgtgaggtacgcgtagcgactccatccagtacattgctgcgacaacaatatcaatggaggctcccgttaggagcacgcaacggtaggggaccttggagccctcagccgtgagcgcgtcgacgatgaacggcaccaatacaagcaaaaatagaagcaaagggacaaaaacaattcctatttatttttcaaaaatagaagatagtggcatttggacgaagtccgtagttgagagtggcattctaattaactctaaatgagtgaattgcactttgtgccatattttattaccaaagtttcactttggaccaccctgtacacaatcctttcactttggactaggtaactttacctttgttgtataatggaccaccctaattcttttcgctagtgatgtctagcgtttcttttgacaaatgtatggcatgcatataggtacaaaagtttgctggcacgtcgttaacaacttcatcaaagtcatcgaagaattgaaaatgtggtttggggtggtttattgtacaataaagataaagttacctaatccgatccaaagtgaaaagattagataaaaagtagtctaaagtgaacctttaaccataaaacatggcccaaagtgaaattaactcctaaatgttaatgttataaatacgaagtggtatttttggcaaagtttcgatgaaaatagaatgccaattttgtccaaatttcccaggtaccgcggtaagtgaaacctgctccgtgataaccgcgataaaaccaaaagcgaattaacactcgtgcatcagcacaaggaacacgggagacccaccgctaagctccctccctcctctctccggcgcttccgcctcgccggagatgggcggcgccacctcgccggcggcgccctgtctctccgtctgcttgctgcccctcctcttcctcttcctccacgggtaagccccaagctctcaccgctcttggtttatagctgctgtgctgtactgtaccgtactgaacctcggtgcctaggtgtcttgggtttatagcgtcttagcatgcgttggccgtagaaatgctagatttggtgtgttattgacgcctgcttcgacagatctgagcaagatttcgtcctaatcccccctgctcacatcatcaacccactctggatcgctctctcgcttaattaggatcccttggatacatacagcgactgtagtttgtaaacatgggtaattttaactaagcgtgattgagatgaaatgaaacgtctttgttcagggatgctttgttttttggtggtgcattcagctgaagaagtggctgtacaatgttaaggtcttctcatgtgacattttgatgtacaatgttgttttggcgtttgattttgggcagatgctggagctgcgtagctatcgagagggagaggacgctggcgatgatcaaaccggacggtctatctggtaattacacggagagaatcaaggaggtcatcttggagtctggatttgatatcgtcaaagaggcagtggttcagctggatgcggagagggcatcactcttctatgcggagcattctgggagaagcttctttgacagtctggtgaagtatatgacaaggtacctttgtcgaaagacttgtgtattttgttccttgcttaagtcctcacagtcacaggctatagtgaatcgtttcgacagtgaggccatatcaacatgaaaagtatggaatgcatgacatgtgatacttttttttaagaaactatttagctcgctaagtatgagatttgaatttgtgggcagaggaaggagcatgtgtggtaccatattttcaaattattaggagtttatcatttttgaaatttggctgttagggcagctagatatcatgtttagacaactattcgatacatgaatctatatccggacattcagaaattctaagctgcttgacaggtagaaagctagtactagacacatacgttgtagacagtgagaacgcaagtgcagatgtagaaatttattcctccgtaatcaagaaccccactgaatattgtataatttatcctaaaatcagtttatggtacctcttaggtcatggtactaagatgtactcctcccaatgcatgttcttgagctaaatcagttcattgggaatcttcaaaatgttagcaacttctgggaatacaaacacagtaagctggttttcctatttgcgaatgcaatgcagttttttctttcaggtggcaattttttgctgcagaaagccccaacaaatttagttttactgaacaatttagaatgctaatttaacaagttctctaaaggattggcaaacatggctgaacatttttttttttgtttgctgaatatatcaatcttcattcttcttttttttttaatatggattggactcctttatcctgatctgcctcaatgatactgaacagttttgacatgcttgtttatgttgttctttagtggtccagttctcgttatgattctggaaaggcccgatgccatctcacactggcgagttttgattgggccaactgatgcaagaaaggctaaaatttctaatcctaataggtaaagaacaatatcatttctgtatgatcattggttactccgataccacatgggaaacagctatgagcttgttccccaagaaacttactgcactttgtcaacacccacatacttgtgacaatctccgtgacaatactctgtttgggcctgattatgttttcttggttttgctactgtattttcactctagtcacaagagttatgcttccttccatttcagcattagagcaatgtgtggagtggactcagagaaaaactgtgtgcatggttcagattcaccacaatctgcagccagagaaatttcatttttctttggagatgttagatctggttggtttcttcatcttgttccataaattttgaagagccaccaaattttctaaccctgttctgtgataatgcagatactgtggaacatgatgagctgtagtcctgtagaggatagacaggtgtatatgcgacatgtcgtaaggcagataattttgcagtttatttgttccatacagtgcctaacacctggttggacgatgggatttggatccaatggaaatatctgaacatcagatgagatggagttcaaggaaattaactttagattgtgtatggtaaagaccaggacggtgcatgccagaaacaccactgaagcactcatccaaatgtaatcgtttttgtactggtgcaaacttgtgcatccaatcttctgtaagcctcgtatatttagcctagcctgtgctgttcatttcaaagaaatcgttagccatcacgaactacccctgtttctgatcgttagcaatgatagtgatctaaaattttgctgatcattgaccctaaaataaaattctgaacagtaatttcagaatccagagagcccctatgaggctatgacctatctgaagttctgaaccggggagatttcacgtgagttttgtttcttgtaaatcatggacaaaactaacagcagaattgagtttcttctctctgctttgcaattacactcctttgttgaatcttgaatcctgaatgaaaaatgaaagttgacagatatattcgttgctctgcgcttctcatgctaatagcttcactttgctgaaataactaggtaagcacttgacactagccttgcaactttggttgctgcatgtctgaagatttgaacaagcaacatttgccgccctccagatgattttagcatacaaatatgatcgtcactagcaattcaatatggcaaagaaatttaataatatccctagccctgcatctgactaaagtcgttcagatttatgcacaaaaaacgaaaaaaactagggctcccattggatggcctaataagccaaagaaaaagctaaattttaattttttatacttaattttgagatattttcgacgtagtttctttttcaatattgacttttaaatcaccaagaatacatatataaaagttttacctacaaatttatttttattccttggcttattagggaaaaagctaaacaatggaccttagaaattgtccatacaattaccacacactagaattatattgaaaaatacatgccacaaattgataacggtaacatctgtacactttggggtttaccagtgaagccacaaaggccgagtttagttcccagctttttcttcaaactttcaactttttcatcacatcaaaattttcctacacgcataaactttcaacttttttcttcaaactttcaattttggcgcggtactaaacacacccaaagactgcaaatatctaaggcatatttgatgtttgattttaatgaaactaatttggtgttgtagatattagtgtactatactctatattctcaaaattataaaagtttaacacattatacacttacatacttagtcaaagttataaagattaactttattatgataaaactgaactacctacatgtagaacggggaataccaatcagtacaagctccatgctgaaaccaaacaacaacagcaacacaaccctcccccccccccccccaacacacacaaaaaaaaagaaaaataaaataaaagaaaaatccatggtatgcaatctagttgaataaattggattatattttcgcccttatttttttaactaattgacatatacggcttgtttgacaacttacaacttgagggaagatgattaagagtttagacaggggaatgagaattcgatgtgcagttccaatctcttgtttggtagagataaattgatagagagtttagttagagaccgaacttgaacgaaaatgaatggttaagatttgtttaggtaaagtaaaggagaaattccatcctaattaccaccacaccacctaggtattgaaaagtagggagttactccctcaattccctatcccaccccaacaaaactcctatgtttctcaaccaaacagaaccgttaatagtcacatccctttaaactcctaatcccttaaaaacaaacctcccccaccaaacagccctatatatgccacttctccgttaaatttgtgggcgcctttatcactatatggcatacgtcacggagcgcaggcacgccaaaaggcaagatgtactccgttgaatttctctgccatttgcacgaacactttttgagaaattcgatggtgtgatgtaattgtactaggaagctagtagtacgtacacgacggaaattagaaatcaaaccaatgatggatggatgcatgtggatccaattcggcaattaaaaagaaatggagaagaatattgaaactgatgaaagtacttctccatttccttgattcaaaaagaagaacaaaaaaaaacagactgaacaaattaagaagagatttcttacgcatgcaaattatgcctgatgaggctcacatatatatatatatatatatatatatatatatatatatatatatatgcttaattaatatttttgttcttagtggcacctgattaattaatagtaagttgcatggaatcaggagatgatcacttgctggatggacatgatggcctcatggagttgcgacgatgacgacgacgacatgtgctcgccgcgtcgccggccggagcttggtgatcacaggaagggccggacgttgggcatgaacggcacggcgaagaggggctcggcgccgatccacggccggcacgacggcgacggcgacgacggcggcggcgggcccgcgagcgccgccacgtagatcgccgccagcctgcgcacggcgcgccggagccacctcgccgccagccacctcagccgcagccgccgcaggaacccgcgccgccgtcgcccaccaccaccgccaccgccaccaccgccgcctagcctgacgaccgggagcttccggcgccgcccgcgcccgcgccacaccagcctgtgcccaccgccgccgcgacgctgctcgccgacgtcgacgtcgacgtcgcatggcgcgccgccacccatcctcctctcctcttgatctcctcgcgcccacgagaagaggtcactgacgcccttaaatcctcgtggagagagagagagagagagagatatgagagctaattaagctgcctgctttttttgcgtcatgcaaagctaacctcatttgggaggggaggaggaggggaggaggtactcgtctacttctacagtagtatatctcgctaactttaattcaagttcaagatacgtacagagttagctctagcctctactccctccgtccaaaaaaaagaagacaaaccctggtttccgtgcccaacatttaaccgttcgtcttatttaaaaaaattataaaaaaaatttaaaagacaagtcacgcataaaatattaatcatgttttatcatctaacaataatgaaaatacgaattataaaaaaattccatataagacggacagtcaaagttggacacggagacctatagtttgccttttttttggacagagggagtagctagctagctacctgtgcttgcatcatcgtcttcgatgaagttcgatcgtcttcaattcgtcctccttcgatcggtttcatgtttgacttgcagcgccccgggccgcccggccacgctcctctccatggtttaccttttcagttccacgccaaaattaaaagtttgaaataaattaaaacgatgtgacggaaaaattgaaagtttgtgtgtgtaggaaaattcgatgtgacagaaaagttggaagttcgaagaaaaaagttaaaatctaaacaaagctttagctgatttgatcgaaggtcccgaattttttaacaaaatttagttaaatttaaataaatattaccaaaattcacgaaaaattaaacaaattggctgaaataatgtcgtatcggagagggttcaaaatatccaaaattttcaaccctgctcctctcgccattatccacctttttaggttgtattcgattgttgataccttttgtacgtaaaatggagcgattcattaacgtataattaagtattagctgatgattttttttataaatagattaatataatttttaaaacaacttttatatataattttttttctaaaaaacacacagtttaataatttgcaaagtatgcgcgcagaaaacaaggatatgagttgggaaaatagggtaatgaacacagctttataatcctatcatttagcaagtataagcgaaaattttcaattttagtgaaaattaattttagaagttgactttatttatcatattttatttttcagtatttgtttctaaatagttaagaagacatgtataaaagttctttttataaattacttccaaatcgttaacaagacgtttctcttatgataagtacaagcgaacatcgtcatcaattccatttacggcgaaatgcaggaaagttaaacattcgtgtggtcgtgtggatgatggttttgcagtgtagggtagtagtagtagtgcagtagctacgaatacagtgagtggtttggagcatgacgattcttgaagccttttttatataaacagaatgcatggcgtgttttggcaaattggcaatagttaacactctctgtctgaagatgatttcggacatgtcaagatttttggtgattagttaaaacacggttgctaataagtacaggaatatggttggtgatgacgaaatttgcacttcgatcctgaagagataggcatatgccactaacttttgatcgttattaattgtcagttttctacctcagagatggaagtactctaaaattagatagttgattaattaatgatgtcatgattttaggctaagcggtatacaagtttggttgatcgatcagaagaagtaattcatctttttggtgatatggcacggttgctaactactactccagtctaggcattacggttgctgtctttgtgatggtcgaatttgcactcaatccagaagaaatatatatcaatgtctctgtcatgctaaaagaacactgctaaatacactcttattgtttttctgcaaagcttgttcttttctaatttctattaccactaacactgaggtggtgatcttgtgaaattcagtaattaagactaccgttttatgctatgcaacacccatttttaggcctcatttggaacaggaggattttcacgggagttctggaggaaatgaactgttccctataaaaatcctgtaaaattcttacgttccaaaggagaaattcggcaggattttctccggccacttgaaactggaccagaagattccagcgtaagtactacagctatctgcagacaatttctgtgcgagcgaggtagctactgaaagtctgaaaccaatggtgctcatcaggtgttgacgagaggcaggcagctagcaatgaaggatatacacgatcgagctgaatgccaagaacccttttggaagctagcaacccctctctcctccactgaaaaatacatctcacctggtccttcactttgcaccgaaatctgccgatcaaaacgagtttgttggcatcgagaaacgagagagaaattgtcttgttaggtatatcttgcttgagagttgagagcgcttaagattctaagaaacggagttaataaaattctaggaaaggtaggtttttttagcttttagcttctaataatttatttcctacattctataactatacatattcttagagaatttaagaatatactctaccgtcccaaaataagttaaccctatctaaattcgtagtaatagaaaatgtcatatcctataggacctataccaggttaacttgttttgggatagaggaaatataatgtttagggagtaggagagccggagattttagaaaaaaccgtagctgtcccaagttcttccaaacatggcctatggaggtggcgcaggagcaggaacagctagctagttagagctcatcaggtttggctcgtcccaagagccataaattgaaccatatccattcattcctgctgccgctctggtttaatttctccatatgtaaggctctagctgacgatatccgaacaagagcaaagttcatcatgaatacagtggttcttttatgaaaaatgaaaaaacacagttgttcagagagagagagagagagagagagagagagagagtgcaccttcttttcctggggaaggaggatccactcccgctgggattgttgtttctcactgcatatttgggaattacataaccttttgcagctcctattttatgaaaacgcagcaaattttattgaggatatataacacatgtagttagtgattgttatcttccatcacgggtaaaaaaacaatgtttcaattatatatatattgctgatccaaatctgatgagaatatggtatgcataattccgaagactagaatgaattttttaattccatgaatctgcctcttccaaaaggttccgtttttgtagtgtccatcaaccaaactttctaagataagaagttaacttccactaagatcacaacaacccaccttacatgccagaaatatttgacaaaagttttatggttccttgtgatctcctaccactgatgttacacagaatgtttccctagccacatgaatttgacaatatatgactgcagtgcgtagtcacagcaacatccccatgagaaggggtggatctggaaaaggccattttctattgcacccaaaacatgttcagcagcacttatgcaagcaatggttcaacaataacaacataccataaaggttcaaataaaggccaaatcaatcaattgatgcccttgttgaaatgacgaacaaatgttgaaatgacgaacaaatgttgtcttagaaagctagcatgggattgctagtactagattaagaatgctcagaaattagaaccgtccgtcgattctcatcagaaacacgatcaggaattgacacataatttcagcagttaataccaggacctcaggaattgacacatcatttcagcagttaataccaggacatgtcacaaaattgtctaacaaaatgcagttaagatttgattttataaagcgattccttgctagtcatatgcaaaaactaacagatgtagtaggtgaatggttggttgtttcatgacatattgatatcaataagtacaagctatcctttcatttgctcctgtggtcactgttgtagtcatcaatcagtttctcaacatccttccagaacaaaccttccacaagaaccccatccttggtgaacctggcaaagaaaatttgttaaaagcagtgcaaaagaaaatgcaggcattcataaggaacagaaaatagtgctaccaaaaagtacttaacagatacaaacttagttgatagataaatatcccatggcatgagataagtggatcagagactgattttgcaaaatttacactcattaattcattaggcggtatcatagtatagaggcgcatgcctgtttctagtcacatcatggtactattgagtaaacgtaagcttttacaagcagcagagcatcaaaccagttgtaatgtttgaaccctgaaactacagcaaaatttagatgtatcattttagaatttagatttacttgatgtcaatagtgactgcataatttaaattcataagattatataatacattccagccattagacacaaaaatcaccctgttgataacttatattttcatcagaatacaagagtacaagaaacgttaccattttgtgacactcttagtgaaatggactggttcactggaagatttagaatgtggatctgcacttgctattgtgagggtatacatgtctgacaatcttggtaactttgaagatataacaagcccagtcctattaaatgatccctgtaacagaagtaccgcggggaacaagttaaaagatgagttaaaattgaacaaagcacaaggataaataatgtattcacacatcagctataattatcaaaattacacatttacttctgacaagcaaattgttcgatatcacattcacacctcacatggtgtaattgaaaaccagaagtggcccactggccctataaatctaatatagtaaagctaagtcgattatattgctactactagtcagcctgaataataggtacatcaaaatttccctgaaatcacattgacaaaataattgttgcaactaacataggtgaggataaaactttttagatcaaaggtcaaacctttgcttatattgaagggcaccgaataggatagctagtctcctgaacatgctcttatattgaaggcaagtgtaatgatacaaattttctgggggtaccaatttacagatgtgcattgggaacctagctagttccaccaaaaaacgaaaagcagttcacaactcaatgttcaccagtacaccacaaaagaaactaacactagttactccaagtaatatcaggagaaaaaactgctcaaatcaagccaaaattaattgcagcaacaatccataaggaacaagctttcgcaacaggcagtcaggcaccataacctgaattcaagcataattatgaaaactgatgaaatatcgcaaactttccttgaaccgtaacacagcatatctatgtgacatgtttaatcaatcaagatctatagagcaaattatgagcgtgctatgggcatcaccgcgggagggtacgtgaagaggatggcgttcttctccttggtgtaggtaacgatctgcagcgccacgttgagcgccgcgtacagcgcgatgcaggcgaggaggacgtccctgttctcggggaacttgcgggggtagaactgcgcgaggagcgcgacggcgatcaccgccgcgccgaccgccagcctccggttgctcagccgcgcgtcctctgggtaccccttgctcttcgcgacctggcgcaaacccaccacccaccacagcatcatcagaaacaaccgagaaaaatctcaaatctggaggatctcagaagggagggaaggggattgaattagggtttagcgtttgctgccgccgttcacctcggagacggtctcgtcgaggagatgcttgatggagtaggggtcgaggaggttggccttcttcgccgccggtgagggggtggcgccgccgccgtcggtcgccatccgcgtcgtcgccggcgaaacggaggaggatgcggtggggaacagaatatgatgcggatgtttcactgacgggtgggcccgggtatgaggtggacagtgttcgccacgtcggatactgcgttggcttgaaccaatgggagaatacgtgggagtccacgtcagcggaaaacccaaactagtagttttttttcattttaactaccatggtagcattattatattttctctcatataatagcatatatgttttctcaatgtattattcaaatatattaaaatgacaacataattttaaattttgtactaactttacgaaactactaatgtgtaatattcctattgtattttatatatgtgttagttattaattatttttattattgaattttagttatttgtaaattatattcttatataatttctttttttaattccaaattttcattatctgtaaattatatttctatatagactcaaggctcttcttgcaatattatttatttttaattcttaatttttattatttctaattgtatttctacgtggactctaaactcacctttcaatattctttaatttttaattacgaatttcagttacttctaaattgtattcctatattgactttagagttttcttcccatgttttttcttaatctcgaattttagttatttgtaaattgtatttttatacggactctaaactctacttttaattttattctgtttattctgaattttagttagttttaaatttctatatggattctatactcaacttctaatattccttattttttattccgaatttctattatttcttaattgtatttctgtatgaactctatactctacttctaatattccttatttttaatttctaatttctattatttcctaattgtatttctatatggactctatactcttcttctaatattctttattttttttaatttcgaatttcagtaatttataaattgtatttctatacagactctagtctactctttcaatattccttattttttaattctgaattttaactatttctaaattgtatttctatatggactatgtttttctttttctccaattaatatgagaatttctaacccgtgagagcgaacgtggaggctcctttttctattcctttaataagttaactagctgggtggcccgcgcaattgcgcggctagcacccatacaaaatcatatatttttctagtataattttacttaaaagttattaaatagctatctcattgtcttaagactttaaaagaccaaaccttatcatcctcgtgtttctaattatatagtttttaaaagtcacgtcagttgctaccccttatgtcatctacttctttatttgcttgctcgatctactactatttctattcattcttcttagaacctttaaaaattagattttatagtttttagagtttattgtcatgttgggtttcatttttataatttctagatgtcccgtcaaacattgccattatactcctctactgcccgtccactatattttttctttgttgtcattgagattttaaaaatcgaacataattatcgtttggatttattttttactttctaaaagtcccgccaaaccgtcagcggctttgccattgtactcctctacggctcgcccgctgcctcccttctttattgtcattgagattttaaaatcgaacatgattctcattgttttttattactttttagaagatccgaacctttaaaaattggacttgtagttttatttttttatattttttaagaagtcccatcaaacaatgccactatgcccctctacagcccatccgccgcctactatttattgtcattgtgattctaaaaatcgaacataactatcgttggaattcattttttttttattttctagaagacccgccaaccgtcggcggctttgcaattatactcttatacaccccgcctgctgcttctcctttttattgtcactgagattttaaaaatcaaatatgattatcaatgtttttttttactttctagaagtcccggcaaccgccttactcgtttgctttatggcctgcctgacttccctccttttaatcgtcattaggattctatttgatgttctattaataatttttatatgtcgtatcaaccatcaccactctactcctttataggtctataacttaatttatctcgtcatatattttagatggtcttttctttcaataatctttatttttatcacaaattttagttatttataaattgtattccaaattgaaatcatattcttttttttctaatttcagtttttttttaaatttagttaataccgtattgtgttcttttaatgtttttatttttttattttcaatttcagttgtttcaaaattgtattcctacttgaactctcttttaatttttctaattttggatattattttttattctaaattttaattaatctcgtattgggttcttatatggattcttctttcaatattgcttatttttaattccgaactttagctaattttaaattatattcctatttgaactcttcttttattttcttttgctaatttcggatttatttatttttattctgaattttaattaatctcgtattgggttcttatgtggactcttctttcaatattgcttatttttaattctgaatttcagctatttttatattgtattcctacttggactctcatttcctttcctaattttgtattttattttatttttattttgaattttaattaatctcttattgggttcttatgtggaaacttctttcaatattgcttatttttaattccgaatttcagctatttttatattgtatttctacttggactctcatttcctttcctaattttgaattttattttatttttattttgaattttaattaatctcgtattgggttcttatatggaaacttctttcagtattgcttatttttaattctgaattttaactatttttatattgtatttctacttggactctcaatcctttcctaattttggattttattttatttttatttcgaattttgattaatttcgtatcggattcttatatggaaacttctttcaatattgcttattttaattccgaatttcagctatttttatattgtatttctacttggactctcctttcctttttctaattttatattttagattttattttatttttatttcgaattttgattaatcttgtattgggttcttatatggaaacttctttcaatattgcttatttttaattctaaatttcagttatttttagattgtacttctacttggactcttcttttctttttttctttttctccgattaatgtgagaatttctagcccccacagcgaacgtggtgcctcctttcaaagctgttttaacaatataatagatagatagattattttatttttgtttcttaattaaaattgtgatatttatgtctctttgcctccctagagtcgaagagaatgtattcttttaaaattttcaaatatcagttgaatttggatttcaatggaatttctttctattttggtgacattcagaatgaaattccatcttttcttttctttttttcaaactagcttgaagaagaaggaagaaaggatatccgatctccagtatacctagcaattcgtaaaattgaccaaattcatgtaaaatttcactcaaatatttttacatttaagccaaataacgtatatatactccactctccactacactgtcatacattttcatagccgccgccgtctcgcggcgatcgaactccacaactcacgccggcggtggcgcggaagaggaggacgccgccgccgccgcatcctcgctgtcgcggggcttgccccgccggagctggcgagcgagcaacgccagacacgcgccgacgagggccacctgcaatgccgcggcgacggcggcgagcgcgatcccgaccctctcgccgaggttgagcttgagccgccgcttcctctcccctccgtagccccgcgggggcggcggacgaggcgcggcgctggtggtggtggtggggtggaggcggcctcggccgggggacggggagggtgccgccgacggcgcgtgggccggcggaccactgttggcgccgccgctgagccgtctggtggcggcgaagccgacgacggagctgggggaggtcgtaggtggccgcgggaggagcaccagcaggaggaggacggggatgatgacgaggagtgctactgctgctcgcggtcgcggcgccatggccggcggatgagacgacgccgccgctgcgcctgcggaggcggcagcagcatgggccttttccgcgatgctggtgtgggcggggcgatcgatcgagcgtgtggccgcggcgcggcggccggtcaggtcagtgtgccgtgcacgagagggaggggaggggaagcagctagcgagcggcgggtggtgtcgcgtcgtggcgctgcgctgggaagtcgcgagagtcgcggatggcgatggtggatgggggtggggaggtgggggggggggggggaggactgatggtgatttcgcctccttctccgccggctcaggtcgcagggggtggttgcaacttccaactcctaacagctcaagcctacgacgtacgtcaagaattgatagcatatcctaaagggtaaaaccagtgatcccttgtaacaagaaagaagaaactgaatgatcactcggttcgatcaaccgaggggttgttattttgttggtgtctaagtttgccacagctaactttagataaaaatgtggcatggctcgaaaccgtgtctgtgaattagtatgctataagtgtggcttagttcaaaagaaaactaagtaagtaaacaacttatgggcccaaaatataaaaaggagtgataaagtctaacttggggtctagcactctccttcgcctcgtcctctttaggctccagcaaggccggcggctctggtgccgtatccaagctccaagacgccgggagcaagccatgcctgggcatcgcctcggctgactcttccataggtcgtcgctctgagcttcctctaccactgactcctccactggttgcggctctgagctactctagtatggcgtatcctcctatcgttgcctcctccaccggccgcgagcgtggccactggcagttcctcgatgccggctcgctcgctgtctcttcgacgttgttgggccctggatctgttgccgtcccgcgctcttgccgctatttcccggaatagacgatgaggtggagaaaatgaggcaagagaaaaggaagagaggggaagaaagaagacgaggcactgatacgtggacccagtatgttgagtcaaccgtttagaccaagtcaacgtgccatgtcaactaaaaccaccctaaaaaaagttgagcaagtcattttacctggttttaatagttggagaagtcgatatgcccagttttatggttgagagataaaaatcttatccgttctatttgagggggtctaattggactttttcctttttttagcccagctcactaaggaaaaagtacaccgaaagtccctcaacttgtcatcgggataaaaaacgtcctcgaacagcaaaaccagatacgcgaggtcccttaactatataaaaccgatcacttgaggtccttaggcgattttgaccctggttttgtcctacgttactgctgagtcagcgtgggaaccacataggccccacatgtcaggatgccaactcatcaccttccttccttttcctcctctctctttctgggcggcttctcggcgaggctaagcggcgatgcagaggtcagcaggcgaggtgggagagaggagggcggcggcacgacggcggccggcgcccggcgggagaagggtagggcggctgcggcggtagccagggggaagcgcgaagaggacagggcgatgtcgcgccgtcgcctacacccgccgctcctcatgctcgttgagctcccacaccggcacgctgcgcttcacgtcgcgacgccgtcgtaatcgccgcaccccacgtgcgccaccaccccgccgccgcccggccgccacggtgagacgcatcggcgcttggcctcctcggcctcgaccatgcggtgggatgcctcggcgagtcggtcgagcgcctgttgcacggcgtcgcggccgccgataaggagccgcgtccccgaaggatgtcccgatacagcccgagcgcctcccgccgcgagctcgtcagccggcggcacacctcggcctccgccgcgtctctgtcgagcgccctggaggaggaggatgagggggacttcttggcgacggggagagcggcgcctccgtcgcccccatcgtcaatggggaggcgcgggtgtgtgcgggcgtcgacgggcggccggaaggcgcgggcgtcgacggggcgaggcgggagaggaggaggacgacgccgcggcttcctccaccgcgcgcagctggggggaggggagaggaagaggtccggcggccgtcgtccccgcagaacgacgacgacgaggaacgggccgctgctggcctccccgcctcctccctcttcacgtgctcgctgtgggagttgtggggaaaggcggcgctctagctgcaagtcgactccatccttgtcgccgtcgcacaaagttgccgctgccattgtgtagctcgtcaccggcgaccagacctcttccgctcccgccgaccggctcgccaaaacgaggaagagagagaggaagaagggagagaagagggggggacccgccaaaacgaggcactgcctccctcctttgcgcccccggccaaagcagtcgccacagcgccgcccatcgccggctgccccgccagcctcctccgcagtccgcacctgccggtcagcctgagaaaagtgagagactgagagagaaggggagaggaggggaaataagagagaggtgatgagttggcattctgagatgtgaggcccaccgtgggtcccatgctgactcagcagccacgtaggataaaactgggtcaaaaccacctaagaacctcgggtgactggttttatatagttaagggacctcgcatatctggttttgcggttcgaggacgttttttattccgatgacaagttgagggaccttcggtgtactttttccgctcacatccaaatacttctgtcactgaggcccatctagcaaacaatattccggcccatgaaaactcccgtgcggcaacgcacacagcttcgcaatctccccaccttatcgtcgtcgtcgccactgtcccccgtgcccgatggccgcgcccgcgcccacagcttcgccgccgccgccgcccgccatgtccggcctcctctccttcgcctcgtcccgcccctaccctcccctccccgcgcccagacccgccgccgccgcccccaggccgcgcctccgcatagcgggttccgccgccgcggcccccaacgccgtgtcccaccgggcatcctcctccttctcctccggagaccgcctccgctcgctcgtccgccgcggggagctcgacgaggcgctccgcctcgtcgggtccgcgcggaggcccgacgcgggcacctgcgccgcgctcatcaagaagctcagcgcgtcggggcgcaccgcggaggcccgccgcgtgctggccgcgtgcggccccgacgtcatggcgtacaacgccatggtggccgggtactgcggcgcggggcagctcgacgccgcgcggcggctcgtcgcggagatgcccgtggagcccgacgcctacacctacaacacgctcatccgaggcctctgcggacgcggccggaccgcgaacgcgctggcggtgctcgacgaaatgctccgccggcgatgtgtgccggacgtggtcacctacaccatcctcctcgaggccacgtgcaagaggagcgggtacaagcaggccatgaagcttctcgacgagatgcgagataaggggtgcaccccggacattgtcacctacaacgtcgttgtcaatggaatctgccaagaaggacgggttgacgatgccattgagttcttgaagaacctcccgtcatatggctgtgaaccaaacacagttagctataacattgtgttgaagggcctgtgtaccgcggagcgatgggaggatgccgaggagctcatgggcgagatgggccagaagggttgccctccaaatgtggtaacttttaacatgctcatcagtttcttatgccggaaaggattggttgagccagcactggaagtccttgagcagatccccaagtacggttgcacacctaattcgttgagttacaacccgcttctccacgcattctgcaagcaaaaaaagatggataaagcgatggcgtttttggatttgatggtgtccagaggctgttatccagacatcgtttcatacaacactctacttactgcactctgccgcagtggtgaggttgacgtcgctgttgaattgcttcatcaactcaaggacaagggctgcgctcctgtcttgataagttataacacggtcattgatgggcttacgaaggctgggaagacaaaggaagcactagagctgctcaatgagatggtcagcaaagggctccaaccagatattatcacatactcgacaatagctgctggtctttgtagagaagatagaattgaagatgcaattagggcatttggtaaagtgcaagatatgggcataaggcccaacactgtgttgtacaatgcgataattcttgggctttgcaaaaggcgtgaaacacacagtgccattgatcttttcgcttacatgatagggaatggctgcatgccgaatgaatcaacttacaccatattgattgaaggcttggcttatgagggattgatcaaggaggcacgggatttgctggatgaattatgttcgagaggtgttgtaaggaagagcttgataaataagggagccattagactgcttgattgaactatgaatacatataagaggatcaactgagtatcgagggtctgagaatgagattttgtgcatcttcgctcttcagcaggagaggagattttactggatgttcacctaattgatgttgctttcttgacaacatgtgagtcctttcatccacttcccaccttacaggcttacagcccacttcagtcttcgagttgcttggaatttctgcataactcttgtcttatttaacatactttaccttattgttgaacatggtctcatgtttcacattcttgtccttacatgatatatcatactagtgtgagatacatattagacctgttttgattgggcatttcttgcttcaatatgctttagcacttcatatgaactagcggaatgaagggatatgctaagtgatgagcattaggctacctgttctctctactcctgtactgtaagccagagttgacttatcttagtcattgacacggtaatgacaccctaattggtttcaaactaaacatgccgctttctcagctgcagttctacagaattgacttgggataaatctaagactgtgagctacagaatttgccaattcaagtagaaaacatgaaaaatgaccagttgattactatctgaaactccctatttacatctaaattgaatgacaacataaaatttgaactaaattttagaaaaggctggaagtccagatttccctttggattgtgggtaccatcagaaattggtcagtgcccagtgatgtgattcaaaacttctttctcaatgagttattttccatgcttgtgatgggaaaatgatgaaattattggattcagtccttcaccactaagacattgatggcacctggccactttatgtcaaatgtcagaccagaaacatgattttcacttatgcagttaccatccttaggcgtaacctttccaatgtgtcatattatactaaagtcgctgatttagtttatattttaattaatttgctctgtttttattgcagtcttgccgtgctcaaatgctaatggaggtccttttctcagattgccaccagaaggtacttgaacaaacagtgaatctgagcctcactgtccatcaaaactgatctgtttatatatatgcaaggcactgataaccttgtaagttgtgaacctttgcatataaatttgtaatgattcaggctcaccagtatatgatgccctcctgtagctaatagtttttcccgtgtcaaatcaaatgaattttggtttaggcataaccatttagcttattattgtgtgtcttcccaattatgcaatgtaccaaaaaaaatgcatcttaggtgtacatctatgcaatgtgcaccatttaatctccatcctggccaaaacctgaattcaggaacaggattttagccccagctttgtagttccaacagaaaaaaagaagaagaaaaactactattaattccaaagttctatacaaatataagaaaaagaggcagccatggaagttcttgggaatgcatcatgcaatccttggttctatgcaagcttttgaaggaccttaaaattacaccatgacacgacaaagaataacttaattcattacaccagttagcaaaataccccctctatatgtaatataccctgtggtaccaatggatcagtgttttacaaaaaatcatgccgaattggtgctcctccaagttgcatggcttcttaaaacatacactgcctgatgtgaaaacacaggaaaccatgcaaagtttgtgtggttttttttcccctgtctgcctagagcagaactcccatacaatctgatcaggcaggtggtggctctgcaggcccagctggttttgtattcagaagaggctggattgccttcacgacgatcgtcatgttcggtcggaagtcggcttcgtactgaacgcacaatgctgcaactgctgctagctgaaaaaaaatcatgaaagaaaaaacaatggcactcactgctgctttctgaattttgtcagatttgctacagtatagctacctttgcgacagccttcggagggtaatcattgttgagctttggatcgacgcactgcttaactttatcttcgctcaatcttggagtagcctgcctcacaaagatcatggtatatgtaagatcattggaaatggaaagattgaaataggatatattgtaataagttatcttttgttgaaggataaaacttctccttacccaagtgacaagactttgttgcccttttggcatggtgtgatcaactggtttccttccggttagtagctccaatagaatcacgccaaagctgtaaacatcgctcttctgatttatttgccctgtcatggcatatctgaacatcaccataatcagaccaacaaatcgtcagcaagtaaatcctgcaaaaggcaaagcatgctgtacagtctgatacgcgagaaatcaatcattctctcccttactctggagcatggtatccaaatgttcctagcaccctagtcgaatgcaaccgggcagcggtgtcggtgccctggttcgtcaggttgaaatcggcgatcttcgagctgaactcgtcgaatataagaacattgctagaccgaacatctcgatgaacgatcgatggctgcactttctcatggaggtactccagccctctcgccgccccataagctatcttgacccgttgcgcccagttcagaaccgggccgggctccgcgccctggactcccttcttacctgcatcacatccaaaaccattaattagcttagccctacgtgtggagattttttggctccgccccctgatcacatgggcgtaaacttgtcgggattttactgttgctctttatctcgtgtttgctttaaatttgggagtgtttttttaagtttactttgaagtacacttgcttcgagtgatttggtgtaataatcggctgtagttcgttgagtaatgactgggatggttttctattccattatgtaagaaaaacataaggtagtagtgaaatggaaaagacttattaccgtgaagaatgttgtgtaaagaacccatggttgcaaactggtaggccagcatgcggttgccgtcttccaagcagtagcccaagagctccaggaagtactcgttcttgagcttggacaccatcgctatctatggcgacgagatgaagatgagcaaaaagctaagatggctcatgtcgcgaggaggaggaagaagaagaagtggggtgttttggggcacacctgggcggagaactcggagtcggtctcctgggaggcgccggggtcgagcttcttgatgacggcggcgcggccgtcgctgagcgtgccgttgtagacgcggccgtaggagccctcgccgatgagggcgcggtcgctgaagttgctggtgatcttcttcagctcctcgaacggtatcgccggcacgtcgatgttcaccggcttcggcggcccgcccggccgcgccgcccccggccctctcggcccgcctctattccctgcttccatccgccgtcgccggagaagaagaccaagagacggtcacgaaatcggtcagcaaaggaggagaggaatgtaggaggccgccgccgccggagaagaggaatgtggagacgcaccgggagcattgacgttgggcggcggagcggcctggttcgccggcgggccgtagctgtcctcctcggcgcctccgcagcaagacatcttcttcttcctcctcctcctctcgccggagttggatgcgcgggctgatctggtggccgccccccgctcagcggatcatcgcgcacgacctgcaaaccattttcgattaattcctcgcgtgcacaccaacagattaaatccctgaagaatcaattcacgaaacggatcaatctctttccgaggaacagaaaattaactgaaaagaaattaaaatcaacgcacaatttccagatgatcaagcaatcatcggaagcaatgaggggatcgtggatcaagaaaacagaggatgcatgcatgctccatatgcgatctggatcggcatgcagaaaacggtagaaattcttacctcccccaaagattcccgcacgagatcgatcgcttcccgcacgagatcgatcgatggcgatcgatcgagggggggcaaagggaagaacagcggtgttttgttccccgggagaagaggttaatggtggggaatggcgggagctccccctctttccgcgccaaaggagccacacccccctggccccctctcccacccgttttaaccgccacacgcacacacgcacgcacggacgcgtcaattaattggagtaattaactaacctctgtgcttgagcaccttccccattattattgactattgttagcacgatcacatgatatgaaactatggaggtgtgccataatctttagagttaattggatccatatcattataaatttactcgttttgaaatacacagttaatattcattataaatttactcattttaaaatacacagttactattcatgaaactaaaagcatgccatcatgattttacaggtattccaaatataccactgtttacctctttgaagtattatcaatttttttgaccaaaatgcatgtccctttcttcttcctttcccttttcctctcttccttccactggcaccgcagcaatgagcttgggcgcggagggcatccatcttagcgattgccgcggccttctatcctcgaggcgtcgttagcggatgcagagccgccacttcatttcatactggagctagagggattgaggaaaacgattcaaatagtaggtaatggttgcgtagaggctgacatgtcttctggtagggaagaggaaggttaactccattgccaccaaagcccctcccatggctcccatcctcggtggtcggtgtggtggagtagcatggacgcgggaagggtagatctaacgcggcggcgggaagaggcccgacgaggaaaggaggtggagctcaccaccatctcgccgtcctctgacgtcactggagaagagatgtggtgcttgagctcgagcattgtctacacgacggctatggtgtgcgccaatccgtgcttcatgggcattgcctcctctttcagggtaaccacgagctcgcatgcactgtcatcgcgttagcttcgctcgtttcgctaccgatggcacttgtactctcgctgattggttcgccttgcgctcactcctagacattgctatggcactggtggaaaggaagagaggaggaaggggaaagaaggaagaaggaagaaggaaggggcattttggtcaataaatttctgacaatgcttcaaagaggtagtaatagcacatctggaatgcctataaatttgtaatggtatggttccaatttcacaaatagtaatggtatatttcgaaacaggcaaaattataatggcatgaatccaattaaccctctttacttaggagctcattaaatgatgactatatgtttgataatacaggaaatacaagcatatacaaactcttctagtatgattcgaactcatatgcaggtagtatcgagtattcactttaattttctctctcccgtatcctttccacgagtctaatatctaacgttttgaatttgcatgaggatactaacgcactagaatagataccatcatcttaatcggacggtaagccccatctcaatcgggcacggcgttcgtcacatgctagaagtaacagatatgaacagttatctcaatcgggcaaacggccgtcacggatgaacctatctcaatcgggccctaattaaagcccgtcaccaatagctttgacccagattaccagtcaaactatagcccgtcacggatgatctatctcaattgggccacaaatagcacccgtcacagatgactactaacctcaatcgggtctaagctagagcacgtcagggatgatactcatctcaatcgggcctaaactatagcccgtcacagatgaccatcatctcaatcgggcattaactatagcccgtcacagatgacccttatctcaatcaggcactaagttatggcccgtcacagatgagtataatccacaaaaaaataaattttgttttttggctaacctcaggcctttgctagccatgcccgttgcaaaaatgacagaaacacatgcatatacaatatccccagcatcacccattcatatacatgcactcacatacacagctatcaatatatttcacacaaccatattcacagaacatctattttaatctcatatttcacatccattcacatattttacgtcgattcacatatttaacatatttcacctgcaaaaccgagttaattggatgaaatatttatttagcaagtattaacatagacataagaaatatatacataaatataaacatcatagttacataatcaaggtcttaatcaatgttcatcattgcctaaatataaaagttcaacaatattcattattttagtttaagcctaaacattcctttggggttaattatttcgcggaggatgaagccggctatctcctcacgaatctcctcaaagttggtaggcagagacttggtaattttgccctacattgtcataattcaagattagttgatcgatcatatatatgtacatcgatgtagttagtatatcacaattaagaccaccgacctcaaattcagccaaagtcttcaccttttctctgtatatatagaaggcgcatgttgtggcacacatggaatccgtgctggtcacctatttgttacttcaccgggaagtcttttttgtggatgagggtgtcatgtcctatcttcctgaggcctcctctttacacgtattggccccacacttcatctatcgttagttgaataggggtccaatcatatgcctgcttatcaattctggagttcaggtagtggcatgtactccacttaggtgttatgaccagaaggattcaatgggcactgcagcattaatatagtgaaagttaaatactaaagctatatgtgtcacgctgttgtgtatatttagggaacacacttactattgattataggcgcacataatgtactccttgtctcagcgggaccacaaggtgtcgtagatgtagttgaacattccttgacggttattctcgagatttgtgacagtgaccacttatggatcaaggaaggcgacttctggtgcatttttctgacaccattgccaacttaacctacacgcaagatacacgggtacccacttttctatcccgtatcctttttctcgagcctcatgtctaatgggctgactagccgttttcacaccctaagattaattgtttctaagttctaacaaacagtaattcaactgatgtaacagaaacctttttaccattgtttctgacctgacaagcatccaatttttttgtatcattgcaacgatcagaaattccactggggtgacagacaaaatacatgaccttgattttttttctcccactacaattagtcatctcctatgctctatcaatacatatgaggtaaagcttatgctctcttattttcttaagaaaaaaaagccatctcatatcctttcttcagttttgggcctccactgtgacgcttgaaacgattggggaccaacaggtccacaccttctgtgggccgcatgggccgggccgtaggcaacgtcagcgcgcgcgatgcagcacgcgtgcgcgcgtcaacgtcgccgcgcacgcgcgtatccaaaacctgcaagttgcgcttattgctgactcgggccatatatctatccaacttatgcgttggttgaatatatgtgtgcttgtataccaaaagggaattgatgtgtctccatcctattctcacttttggaagctatatgtttgatttggagaacaagttgtgtagtagggctcgtttttttttccatggtttagaattaattttgaagatagttccaccgcttgctcttaagcttaacaaccacatctaaaatttaaaatttagaaaatccaaatttggttgtagcttatagtcgtccattaatgataacactgaagaaaatcatcggaaaaaaatatctacttgattttaaaattaagtactaaaatccgaatttggttgtaccttataattctatatattgctctaggtgtggttgttttcgaaatgtaagctgtattagttcaacttgtgtcacaaggatgaagaaaataaatcaaatgacttagttgcctttaatttatagtacaacattgaaaaatatgagtcatgtacttttttttaataataacatttatttagcaagtacgtacaagaagaaaaacaatagtgactaaaaattccaaaactacttacatttacattttgagttgagaaggataaaacaacttaattaagtacaaattcaatgtagcttttagtttttttttatttacaggattaatctagattctttttatgctttaatttgttaggttatagtttactgtttcatatttagcaagatccacgctaaaaatataataacattctaaaaaataagttataatttcatttgtataaattaaagaaaaaagttaatatattaattgtttgagcgtggatctagtagttaaaaagtgttgaagaaataaggaaaaaaaatctttcaacaaaaagatggccggtgaaaacggtacggaaatttccgagatttccagctgccatctccagtttgcatcgatcgtttcagtcggtattggtaaccgattatggtggaaatggaaacagtaatatcttctggaaatgatagtgaaaatgggatggaggtttttccaccgttttggtcggtaaccgtagttgtacggtattttttgtcaaaattccgaaaagatttcaaaagttccccagcgactcagccagctcaacccatcggaagcccataaataaaagaaggctggtaagcttgcagcccgaaaaaagaggaagtgacaagggaaatgttgttaaccctatgacatggctgacatggcatgtggattttggtgaactttggtctcctcaacttatcaatgttaaagtattgttgaattttatttatagggaaaatttgaaccatgccacatcaattttgcaaaatttttgatatgccaccctgacccacatgtcattgactcatgtgggtcctacatgtcattgagatacgggtggcatatctcaaattttgcaaaattagggtggcatggttccaacaaaccatttatattgcttgtcaaacttattatcatatcattaatcatcatataacagtgttatgtggagtgtgacgatgcaataataaagttaaaaagtcatctacgtgcatagttaaatgtgtgctatgccatactccgttgattccgacatgaattttcgatttctgaccaatagtatattccgttctgatggtattgtttccgatataccgatattattgatatcgttaccgttttcgggtctaccattctaattccatttttgagaaaaaaaaataaaaataaaaatggtacatagtttttctaaccatttccctccttagatggccccatatttttcagccgtcggaaatactgtgtgtccatattacgtcgtccccagtatcatccggccggaacccgtaaatgcaaaagttaacgaatgcgacaaaacaatggcaactccattctcaaatcgtgcgattttacttgtttttaagcatcacacatatcgcaccattcttttacacattaatttacacacgtacgcttgaaaattaccgaagtcaaacaaaaacatatcacttaattaattactatacacatgttttcccatcaaatgcgcacgtcaatctctgattaattattctacctaaccttaggtcacattttgagccattaggtaattagacatttagaccccaaactgtaatatttaattaagaacccgacacgtatgtgtcatttggttagctaattaatatttgacagaattaaccatgcgacagcagacatttttttttttgtgtgtgtgtcaattgtatcaatcgatctgttgctgtcttgccagcataaattgtctttccatgataatcatcatcgttggaaaatttataaggcgtgtcaagggtttattcctgttggtgattaattagtacacgtacgtgcgctgacgcgcgcgtgctgcatgtgcgctattagcagtttcatcttttctgctagctactcctactatgcatcaataatcgttggcctattgctggtatacaggggtggagccaaaaaaatttctacgcctagaactcgagtagggcttaacttataggatatttgctctctcaaaaaatacatagtgatttaaaaggatttaggcatgtttatagagacactgcccctgcttgtaaaaacgtgcaacactctgtgttcgtttctccaacaagacatggattaaattttagatactcgtggcatatttttcaaactactaaactgtgcgtttcgtgcaagaactttatatatgaaagttgctctaaaatatcagtttaatctatttttcaagtttgtaataattaaaactcaattaatcacatattattaccacctcgttttacgtgaaacaatctttatcttcatcttcatcttcaggagattcaaacaccacaatatatgtatttatgccactaattaccctgcaaatatttttggatgagcaaaaatgctaatcacagtatcggtttttttaaccaatagagaaaacttctatcaatattttttaatgaaccggcaaaaaaccgagtcaagccgagccgcatgtggggtgaaatatcatataagtcgtgtctctccctctccctctcttccttctcttaattcttctctacagatctaaccacttcattcggaggtgtctacatttctaaccgtggctcgactttggcttgctcttggtaggcaactacatttcagcatctcgatgctgaagggtcatgttgtagtggcagcgggcgcagataatatgaattgcctagagaatttatgtggcgagctggcgactagggattaacggagcaggcaacatggttgtcccttcaacaggcataccgctatactgagaccgttagatctggtcaccatgagctcaagggtaaacagatttgtaaccaacacccattataaacgtaggcgaatatcaagattaagtacgagcatgtaaaacgaaaaacccattagagcatgattaattattttttaattattacaaactaaaaatagatttatttgatattttacaactacttttatataaaaagtttttgcataaaattcacagtttatcgatctagaatctacatcttagtcagaaaagaacgtggccacttgtgaaactgataattaggaatctaacatgccaaatgaacatctaatcaaactaacatatcacatcgatatatgatacgaccatcgcatgcatccatcaatacctgtacagtatacgagacatgcacggatgaaattgaagacattatcacgttgtccccatcgacctttaacctccatctaaagtccccatcgacctttaacctccatctaacacctgatatgattgcatacaatcagtcatgtcacaccatggatatatatatataatcctgcaaaaagagctttgattaattggagattgatctggcaataattatcgatcgatctgcatatctacgacatcactacgtccagatgtccaatgttacgatcgaccgatcatttttacaggaaatttgatcagtacacgtcgtgatcaattaatcaacatatagcaacaaagagcaaaatagtggtttaatttgaaccgttcattggttaactcatggttggtgcaaattagctagctcactctatcactgcgctgcattagcttagcatgacacgtgtctccgatccaaacctccatgggcccacccaatcaagtcctgatggcgaataaatccttctctatctggtcacccatcacacgtgtacagagcccggctagctgcatgccctttcagcaacttggctttgttaattagccgattaattagcgtcgattaaccacagctccaggttctacgtaatcgtgagattaacctaactacaattttaattacggatttgaaaaaaatgtgcacttgcttacccatgcgtacacagttatatattctcaaaatattgttattatattccctccgctcctaaaatataatggattttggttggatgggacatatcatagtacaataaatctatacaggaagcctgtccaaattcgttgtattatgattcttttttgttagataatgaaatatactttcagtatttgctcaacgagctacaaccaattattacaccaaatcgctcaaaagcgttcacaatctaatgagaccaaaacagaaagcaacacaaactaataagcatcaacacaagattaaatatctacaattattgaaatcttattcgtgaaccttcattcgaagttggcaaaaatgtacatattattcattgtactataatatatcatatcaatcaaaatcttttatattttgatataaagagagtattagttaaagatagatcgatcctggttggacaaatccaaccgcagttcaattccggcataatccagggaaatggtattcatgttctaaaacataggtagcgtgttgctagagctatctatctatctatcttctacctgtcgctaatgatcttttcaactgtgacatttgtgttactcaattaatccaacaactccccagcccaagagtaattaaactaaaccacgtaattagtcatgtaattaaactgcctgcagtccattccggtgtgacacttgcgcaaaacaacgagagaagcttcaatatgtttcttcacacgtgtgcgtacgtagcgccaagtggatcctcaatgattaatggtgatcaatttgcatctaataattgagcatcacggattggtatggttctcatttaattacctttggataaatgtgcatgacaaccgaggcatgtttgatggtggagttgtatgtgtaacttaattaggccttttttttcttctaattgtttaaaatttagagtattattttaatgggtatttagggtttcaataattatgggttctttatcttgtatttggtgcttattcgtttgtgcttgcgttttgttaaatctcggtgtgttcgtgtgaaactatctgtgtgcgattgctttagagcgaatttgtataataatttattgtagttcattaagtaaagactggattttattttattatcttaaaaaaggtatttagggccgggatctagtcttaactgttctactctcggttccaccctgcctttaattacgtttactaactaacggatatggtgtttgatttttacaggctctccgtctcttgaccatgtgtaaggatcagcacacgctttaaatggatatgtgtttggtgacgtgcaatcgaaaaatgatatagttaatagccatatgtcaacaatgttctatacagtaattagcatacaaatggaaacggaactttattagccatgtgccacattggctacctgcaggatggagaggatgcatatgcatgatatgatgttgtacgaaccttatcataacgcgtaaagacaaaccgaccaaaggtcaattacgcaaccggagaattaattccaacacctacaactctccgttttaaatgtacatcacttttaaacatacgttttatcattaaacttatttaaaactttaactttataaaatacttactcagtctcaaaatataaaagatattttggacggatgagagatttacttagtagtataaatctggacagactccatatccaaattcattatactaaaagttttcttatccgtccaaaatttcttatattttaaatccatatccaaattcattatattaaaagtgtcttatccattcaaaattccttatattttaaaacggaggaagtataagttatgcatgcttaaaatactatgaaacaaaagagataataattgtataaattttttcaataaacaaatgattaaatatatatgtcaggaggaaagtactaatacagtacatatatgtatacaagatcacaatacacaccgtatcattggttaggtatatatatgagagagatacatgcactagtataatacacattcacagtttcacaccaagtagcttccaagatcacaacacttcatagcatttgttaggcacgcatgagagagatacattcactactctactcttagattttacatttttacaaagtatatgtatgactttaatcttttctatgaacagaactatatgtacatatttccctatataagcatgattttgatgaacaacaaacataaaagggaaaacatttacatgatcaatgcacgcgtatatatatatcccatatttaattagcatgtgcatgcagatgcagtgcaagaaaaaaaactgcaagctaagacctcacgacgtcgccgatggctggcggcggagcaccggcgggatgacggcggcggcgaaggggccaaaatgaggccgtctggcgccgaacaaagcggcggacgacgacggcggtgagccagcgcccggagacggcacggcggcggcagcggtgatggcggcaggggcgccgccgccggcgaagacgcgcggagagaagctctcagaagctgccgcagcaacgaccttgctatgctcacatgaagggcacacccggaacaccgtgccggcagcagctggtaggtggtggaggccgtacagcggcgggtacgacgacgtggtggttcggagagtgccacgcagctcggccacctccctctgcagccgccggttctcccgcgtcagcctctcgcagcagcgcttcagatgctcgcagtccacctccgtctgcttcagcttcgtcctgagaatgatatatacatatatgttgagatgattgattcatgaatcatgatatagtttggagaatagctagctatagctagcatcattcttaatttggttgagatattggagaacacagcaaattaaagggagattagtagtatatggtatggtttgtttgttacctagctcttctgttttggaaccagacctccacttggcgcggtcgaaggttgagccgattagctaaatcactcttttgtttctgtatacgaaatgaaaggtaacttttgatttcatttcggctgtatcgatcttatgcaaacaaagaactttagctttattgactttaatcgcgatatgctggaacttttttctaaaggaagcttaaactgtaaattaacatcccaatcacactcgagtgtgaaatcaaacatgtgatatgtaagttaaccactgaagtgagatgtaacatttattgccaagatttcaaaatttttattttgttacaaggatccgttgccatcagaagaccaatgtcctctggaactaatttggactatttcataatctaaggcaccgtgttagtagaaaacagagatgtgtgatgattatatagggtttcctgaagaacatatggaatccatcaaactgttataactctcaacgctttgtagcatcgaaactatatgtaactgatctcttcgaacaaagtcaagaagaggaggtaaattaagttgattgaacaatatccttctaatttatatgaactagacagcatctgcaaattaagagacctgatatacttgataggacatgcggtctgatgcttgataggtttgtaaaagttggaaagattgagcaagatacgacacataccggagtcagggtgctgtgttctttgaaactatcctccagaaacgaggactgttccttggatagcctcaacttcttcctcgcgccaccaccgccgttatcctcatcgtctgcagcttcctgatcagctacctgctgtctcgtggatgcctcctgcatagaagatggtgacgaaggcctccctgcctctgcgcctccgtctgctggccgagtgttcacatcaaaaccacgtgtgcacatctctgaattcgcactgcctacacagaaaaggactcatcaccatccaacgatttttcatgctcttatatattaagctctgctgtactaaaccacctacagaccaacctggaagttgcaactaatcataacaacagagcaaatatgtaaagttctccttcgcttaccggtctctgcagaggatacaaacagagggaagctcaagctctcgacaggagcctcgccatgagggcgagtttcatcttcttctccctccatagcttcttctgatgattgtgtgcatgttgtctggtcatcctgttcatctcttctagttgctcttactccaagcacaagctccaggtcttcttcatcgcccatgcatgttggtataagcaccggtgtaggcgcaatggtggccttcactggagctggagagtcccctagactaagctcaagttccatatcaaggagagagaggggtcatggagtgaggaggcaaagaggaagcaataagcaactatcatatatatagtggtgatgggccaatcatcagagattgaccagaataataaaataacagtatccaagatgactaagtaatcagaatatagttttagattactgtttatttaatgctagggaaggtgatcaatctaatcacaaataattggaatcaaaagttcatgtgccattagctcggtgattcttgaattattatatcagtgaaggtttgcttatttccaagaggattttccgcatggacattctatatttgagttgttccttcagtatatattctttctgattaacgaatgtaaataatattggagaaatatgaactctttatgtctcacagtagtttagtatttttcatatgcataaaaggtctttttattaccaaatcattgtacttcgttttaggcaattaaaacataccatttctttttgtagtcatagcttatatatagatgtctcaatatgcagaagttatataggaaatattaaagatttccaatggttgcgatagagccgtgtcaactgaccataatgtttcttgaaacagaaggaaattaggtggggaaaaaggagagattatttcctccagtacaacattttttaactttgaaagaaaaagcatggctgaaagcttccatctattcacagtttttgaattatcacttaattgtacagacagtgatactgagcataacaaaggtagaaattactttgtcataaaaattgcttcagaagttatccctcctcaaagattatttaataaaccagtggtataaaatgaatataaaataaaacaataatgcaataaagtctcattgaattaatcgtatatcaccaggtggtaagtaggaaagctgtggtaaactggtaatgtctagaatctgtatatgtcaaatctgaactggaatcatctatgaactgagttgagtggggcctatatctactgatatagatgaccatgatagtatgagaatgtgattctatgcaaaaagaaaaaaaaagaaggaaaaagaagttaatgatttaagaaggaaacacgctgagtatgtagtgagtacagatgtgtgggttctacaagtaaataatgctaaagcaactcctattagatgcatctaaccagaattgctatgtaacttgagcaagtttcatctggactaattaacatgaagcatgagttcaaactaagactatattctggtatagtgagacagtatactactgattgaccacaatgaatttaatgctatgcatgataatgcataaagattatactgaaactgatgaatcttccaacagtgactttagtcaacccaaggttctggtgtcctgatggaatacattgcagaaaatttgattattgctacatcaatcatgcagcacacatgcacatgaattccaatcatcacgtaatgatattactagagggatgtcatagattacaactaaggactgttattgctctacttgcaaaagaaagatttgagtaggaatctatcacataccttataaaatgagaacattgctttcagtaaaatttcagcaaggccgtactttgacaattagaaccagtaatatatttataatattctttgacaatgtatggttatatataatagagaaaaaggttgattgacatggtcaagggtataattttatcatgaagacaaattgcctgttgacagcctatggatctaaaattaataggacagaaaaatgagtgaattttaggatcattttattattgtctgcgtctgagaatattctttagatagatgaaagtagacagttcagtatagagcactcaactgatggtgatgaggccaaaattccgaccctcatgaatatttgcaagtaactgattttgaatgttccagaaaaaaaaactatttttttcatctatatatcttgctttcagagatggcagactgaagcatcagcactaaaacctgtaatatctagcccttgtttttaaagtctgaacgtactacttatttgatggatcagtacgtatttatattttggaacaaaaagaagcactcagtattgttttatagaagcagtattgttttatagaagtttctattagttttatgccattcagtaaattatgaacgtatagtaaaattgtattcaaattttaactccaaattgaaagactcaaatgtgaaggcagaatgaataaagctctctacaaattataataccattggttatcatgccacatcattgtgtgctagaaatgttcttcatactttaaaacatatcacaaaattagaaaataatactttgaagtttggagatgatgctgttttttgaacaaaacacaggggagaagtcctctgcggttatattttatatttatattcaagagagttgcgtcttcaacagaaaagtaatacaactaatttttcatgccttatcgtgcatttacttttttttcgtttaaccaacgggagaaacttggttgccacatgcaaacagcaaacctatcttgctatgatttctcttgtattaaaacccgattagtatttttaaacaggtgatgttctgaaggctgggtctggagaagctgaaggtttcttagtagagcacaaacaatactagttttaaaatgtaaatgtgacagttcattttatcataatatagtttgtcttttttatgaaaacccattcctaacaacccatgaagctgcggtacaatgagataataggagtatgtagatccaagtgatatgctttgaaaaagagcatacatatcaatacaacagaagtaaaccttcaggaaaaggttgatgcgtatcatcctagatgccaaagctaactggtccagataagtgtgatagcattttcaatgtgtcagcataaaaagaaatacagtgagggtactaaatttccataacaaaactatgtttcaaaactatagaacaatttagttgaaaatggattcaaatcaagccacaacacctcctagcaggacttaaagagccaaatatattactctccatcccaaaatataacaatataacaattcaaaatttatcccaaaatataacaacttcacctacattctcttctcaaccaatcacaaccttccaccatttaatttctccacctacttcctcttctcaaccaatcacaacattctcccattaaattccacctactttcttaatacccatgtccaaccctaaaacttcttacattttgggatggaggtagtagcaggtcttaaatcagttgtttttttggacaaaaatagtgaagtcagatatcaatctatccaaaccagttggcaatttcattgctactaggtcttctaaactataataaaagtgaggtataggaatggctagaatgccatcattcggatgctctgtataaaccaatataattggatttgcaagctacactgtcatcaacaaagcttcgctctagtttactcaccatacaatccacattgaccagtgatgcaaaagctttgattgaagtgttagcagaaacagctgcataagtagctattgtcggattacagagtgagggctcaaagacttggagttctttttttaaggtaaaacaaatctaggctttaaaacagaatcagtctttagtatcaactaggcagacatttttacaagagaatttggcaattaagagcacttctagcttgcttttctcaaggagtatgtattctctttaattggcagaaattcaactttcattcaggtatcgtgattttagcctctattattgaaacagtctccaatattgtgttatccaaactacttggtattgcacattttagtcattcacttggtatttcataaatcatggttgactctattttatgtgctatgacagagctgtatgacaaagtaacaccaaatcatgaataacctattttgcaattgttgttcactttcacaagaccacaagaaatcaacttaaaatcagattctctgtatgccgccatctcataagatattattgagtgtttgttatgtttctgcatttagatgcaatcaccaaaacttcatccatatccttcatttaatatgtacatgttgtggttcatatgatgcttttccgtaaaggcatccaatcaataaatgcaggcaatgtcttaagaagaaacatacctcagatctgttgggaacaatcttacaccacctgtcgtcagaaaagcactagcagcaggccttcatcgattcagatgtagcaaagacctttggttattgattggtggttccaaattattggaaaaacatcaaccgtttggggacaccagatagattatttctgaaaaaagttgatgcagtgattaactttcatgatgcaatactaataccaagcacattgtgtatatcggcaatctctccaattaattcatgcacattaaaatctgaaatacaaatcaatcaatgtattaatccatcattaccaatttaacacttgaaaaaactgcctcttgtatatatgtaaactagaatatccttctagattgaagaacacatttcgccatgtggagtcttccgtcgaagtggataacaacactagcgctattttctctcaaatttgaatgtttaacgtggactttattggaaacttttacacatcagagtatcgtgttccatatgtagaacttgaactgctccaaatctagatgtgcatgacaattcataatttcatacagtacaaaaagttctgatgcactgaaaaacattgcagcacacaagcacatgctatccctccatacagacaaaactgaagtgggatgaaccaagcaaaactaaagaacataatccagatgtgctaatagcctgacaaaccaaatagcacaactgattatgttgtgccgaaactgaagaactccatgccatattttgccatagttaccacagaacaaagccttggcagggaaaactataacagttaagcattctacatattcttattgctaacttaattaaccaatgtgtaactggagaaccaacagatccgtaagatggtaaggaatgacactatgacagtcataatacacaaaatttaaatttttaataattgttcatttttagttatgaaaggtataggtgtaaaatgaaatgtatagtgccaacgaatgtgatatgtatatgtcatatttaatgaatgcctcctacagaaatgcatcagctgatctatccttcttagttcttacatgataattattaattggaaataataagtgtgcaacatgacaatacatcgcgtaagttgcgtgtctgctataggaactgaggtgtcattctcttacgtcaattatactcgacgtaaactataagaagagaacatgataacatagatctaaaacagcggcatcacaattaacaaaatttacaatatgcaatagataccaagtgaccttgtagcatggcagtttcttgaatattaaaatgctacatgacttgtccatgatcatttcttagcggccacaactgaaaaaaaaaacaatgatgtacagatgcttgtcaactgacttattaggaaattcaagtttataatgttagtcatgggaaatatgtgaataacaatcaagctatgttcatgacctgcaaataccaacttcagatagttcatgctctagattattaagtttcaatcccatagaactttccaattcttgattttgtgctaagcagcaaacaatgcaccttaaacaaggatagattcaagaatgacatggcagtcttaaatgcatcttcctatatactagaaaagggttatgtattagctcttataagatcaatttaagttgcactttacatgaaatatgttaaatgaacatttttaccattgtttaccgatgatagatggcataatttaaagaggccatgccagaacaacactgtcatagccttttcaagtcactttaaagcacacatctatattttgctagaaagatataatatgggatcatttccagtatttgacttgcgtgtaacaggcatcaaatatatgaaaagaaaacctgataacattgaatactgccatctgtaaacagtcatttgtgtgccacttctaggaataatacgattgacaggtcttgatgtcctctatatcatgcatgcaactcagactgcctgcctgttaaaatatttcagcaggttaaagtatgagcattttgagttcatactagtaaaaaccaacatttatgaactgttttaagaatttatagttgttgtaaacaaatttgtccaaacatcacaagtgaatgcatatgaacacattgaaacaaaagcatagagtccccaattcccatactgagaataaactactgtcactccacgagcactactgagcttttattgtttttcaaaggttgactttctatattatttgacttccagggcccacatattcttaaagcgggttactccacgtccatgttactgctgccctgaggttattgaatgcagtatagcttaaagatctaataacaatataacattcatgcttgagcaactcctaattatttgtaatataaagtctatctaatatgttcagtttagttccttctctttgtacgtggaagtgtatcatttagtcataatgccctcatgaatatggataaacaatgagaggtttgtgtccctgtaggcgtagcgctgtcaattacatattttctaccaatgttaaaaagaaaattcaagatattcacattcaagagaaactaagcatggaacaggttgcagcacatatgagattggtggatactggatagaagagcacaaactaggcaaactcacatcgccattgaagaaagagtataaaataaagtcatgccacggccacttcctctatgaatagtactgtaattcttgccggatgcagcatgtgatcgtatttgttatatcaaatgttctttcaggagcaccatggcattgtttgcctacagcatgtgctacgggataagccttatgtatcactcaagacactcattaatagagcattagggcaagattaatttatttccccaccaaacctccctccctctcagtctgtgcgtgtgttactattaacagtagcttcggctaaggtccacggtatatatgcagttaagcagagaaaagataaggagggcacaaggatcaaaagtaaaaaggaacagatgctcagggcatgttttcagtagaaaatgtgatttacctgtagcgtcagagcgactgcatatttgcattgctgctgttatctgcagtcacctgtgatagggtaaaaggagagaataagtacaattgtactaccactcttcctagaaacaacatgcattgtactacattctgtcggtacagaacaaatcagaaaccggtgtactctagttttggaatgcggcattgcagtctgctaactgcacgcgggagaaaaggcaaacagagcagcatgctagtaaagagtgaactgcagaggacacacagttcatgtctaaaatgcaaaccaatgcaagacaccacgatctaaaatatcagactttatacagaaattagaagctgaatcttgcacgagtctccatgctaaatcctggaaaatcgtaacaatgttttacattatagaatgtttggacatgaaatgcaggagcttgttccagggatcaattgaatgatttcttcattcctttttagtttcttcctttgcacaaacataacagctcaaacaccaaacagatattcaatagaaatcatgaaaaatgaacccagatatgaagcttttccaatgaaaataacatgaggcttcctttcgagggcatcatttatcttagtttctggaaaaaaaaatcatgttcccagttcaacggatttcaccaacaaatacggctcacttgacacttcaacagattaatccctcaaaagaaaagaaaggaagatcaaagcaccaaaattccaatgaacaatgctcaaatgtgattggtattgaaatattattttatgagccaacttagagagttttaagaagtccataagtacaagatgcacgcaagaagcgtatgtaacaagaataccgattgcagtgatctcacaataggacaatatatacatattatatgaactagaaacccagcaccaatcattatctgcatttgcatatagatctgcaattggaggtgtcaacggcacagcaaactggatgcttcaaatttctgaagaggccctgtacctatcgggcggtggcattacaaacatctcggttgtaaacatcaccttttattattcaacataactcatgaatctctctttctgtgctaggtaagttgactaagcaaactcaaagacatcaattatcattctggagtccttaccttcattaattgtgcaatgtgcattaattgtgcaggaatgtttagcatttgaaaagtacatggagcctggagaagatgcttcattccccctaaactatagcgtgaaaagtgagtgaggcagagcaatggaagggggccagtagtcatgcaagtagcagcaccctctgactggatcaatcaaatcctggctgtattttcattcattatcttgtcaattttgctgacaagctagacttaactataacacacaagtatatttttatggacgtaagcattcaggcaataaagattgctcatgcatgcattgtgtactcatgatctaatgtctaatcaaatgcagaagcatctttctgttagctcagttcaagagggcctcaatactagatatgtaaaggtgacagttcagttgcaaaatgcagagatttgtgttttttttatggtttcataagccaaaattgtaccagactatctctatatggtgaatacgaaaaataaaatattgacgtaggtttttcactgggaccatggaaattacagattgcagaaatgtattattatgagaaacagagcaagaatttgattcgtttcttacccaccatcacttccatcaacttgcattagtttgatatgctttaaaagcaatgaattgactatcagaaggtcaaaagatataattgcagaagcttcaatctttttccatggtaacaacacccctaacagaataaaattccaatcattagcattgcttttagtataaatttacaaaatgtgaagtagtttgctagtgtaaatcatcaacatagctcaaattaatatatcgaaacaacccagcacagaattgaaacacgatgtgattgtccatgatacaagacaatacagtagagaaggcacagtgttcaatgaaaaaggacatggtattaaatcaataactataatgtatttactgaattttcctaaaaaaatttctcatgatcacatctgttcaaactgaatttggatattttattttttaaaaaaatgctctgcattgtaaaattagtgtcatactgaaaagcaacaaatagcgttcatgcaaagttgataaaacacaggcagtatacccaggaataatgttgcatgtcaattactatactgatctggtaggctggcagttgacatgtgctagcaaagaatctatcccgtgctatattttcatatggattcatggcatgaggttaggaattccaaagttctcatctgcacttcggcattcccacagaatcattagcaaccttcaaccaaataggatggcatgcttttactataaaaaattggatgtactcccaagtatttgaactgattggctggtgtgagtatttgatagacgacagataaggaagaccatataaaaagttccaagtgacaagcaaatttacaaaataaatgaatgacatcacattaatgataacaggcaaaagtaaccaaagagaactcttccttctaaataggaaaaaagtagtctatataaataaggagttagtgtaaaacattcttgccacatcaccaaaactactaagtgttaggacagatgaagcagagtagttgtgaagttcaaaatttaatatatctaccaacttaagaaaacatctaatggttttgacctgccagtttatagaaccttataactttcatatggaagagcaacataggaagctataggaagttggtgtatcacatagatcggacattaacagcattgtttgttacaagataatcagaattctgtgccttcattcggcattacattgacttttgagacactcagtatatctgtattggaattttggatgtacaactaactgaaagcatattttgaagctattgcatgaaaaagctcattataattggtagagattcccttggctaactaaatctcagaacaaagcacaggaactctaaactagcccttcaattagattgaagataaatatgaagcataattaaattttattaagtaaggggacccaagttccataagtataatttgcacttaatcaatagtagtaccatacaaaacatacacttgaacaattaacttccaaatggattatagtttttagtaggaataaaggcgctatggttcagcattagcacataaagttgattaattagaaaaactgtttagcttagcacatatatccaactgaaactatcgtccagttgtctgtttcatattttctagagttttacttttaaaaaaaaaacgactagagttttactttccatggtcactgggtttacgaaatctttgtagggcacgcaattgctttcttaaaccaaccagctcaccaaaagtcacatctgttcactgcttgttagctcaaattggccaaatcaagaataattgttgacgaaataattaattatcttaaagattctcaccagggcattatttcaactgattcaaaacagcatcaggagctattgccgtttactataatgtgacagtgagccattgcttatgcagctacaaattggtgtataatcccaaacactaataacaaatacaagaaaccgatcccatgtagttgattccttgattcactatgtagcaaattttctttctgtgatgcccctaaaacatattggtctccacagaacgaaaaggaaaaaagcgatcatatccgttgaagaatatgtcaattgcaaatgtacccagtatccatctcacagttgattctaacattaatagtcgcagcatcgcaggctgcaaacttatcttcatgggcgtcaagccatcaacaacttgagtcgctatagacgcaactgtgatagcccaattgcccaaagggataacaaccatcactccaaactcaaaggcttcattcctagaacagctaactgagtctggtttccaagtgaggttttaccactacacttctacctcgaaccctggactagtaagcatcgcgccgccgtccagcctccaggacggcctaggctacagtacgaagttgagaaccctagtgcctcgatggctagtccatggcagcatactcctctcagcctctcagcctctcaccctggccgctacaagtacaaaccccactctacactacaccaacccggtcggcggagagcgggcgccgggagacgctcgactcggagtcaaatttgaacctcatattggcgagcggaagcgtttaccaccgcgaggatgaatgcggaggaggctggccgtggccggccgccacgccggggatggccacggcggcggcggcggcggatcgatcatcggctcccggcgcccgggggaatccccgcacccagccctcaggcgcgccggccgccggccgccgggatgagacggagcaggtgttggtggccgcggcggcgcggcggggggcgaggcgaacggcggccgcgcgctcggtgggcgtgcgagtggggaagggaaggaaaatggaagagaatgttcgctttgcttgtgggagggggtagtgggccgaaagctggaggaggcccggcccaggaaaaattttgcattcgcatttggagagagtagagagatctacatcctatgaagcctttattattttgcatctaatttagctaacttttggtctgagatgcattcaaattctgaaatgtgtgtgtgcctacaagatttgaaggggggactacaaagtatttcgtcctcaccgtcactgcacacaggcaaattgccttgtagagcaattaaaatatattatattttattagggacttgtaatatttaaagtaaattttgtgatccaagttaaatcattggtagactataaattacttacatttatatttgtaattacactctaaatttaaatagttacattgtattttttatattacacactatacgagaggattagtattaaaaatgattggttgcctacttgaaaaggtttataggagagatataaacatacctacatatataaaagagatagcgatcacttagagaaaaaacacagaaatcaagtaaaaaatggaatatttttagaaaaactattttattatatataaagtatcattgtgaataaaaaaaagttttcataatacttatcgttttttgacaaactgataaaaagagtgggcatgggagtagaaatcatgtgggctctgcccgcgcaggttctcgaatcctgccgaccacgcctttcttataaaaataaattgcataatttatttttagtttttattcaattttgcacaagatttgtatttatataagagaaaattcgattcatagcacaggaaagaaatcggtaccaaaaaatagcacacaaatttttcgctttcggcgagaagcacaggccaccgtttttccttcgtcccgtagcacttccatcgcattcatccatccagtgaagtgttttgctgttagtcaacagatagaaagaccaaattgcccttcttctatctgtatagcaaggcccactcaatttgtcctacgctgatatcactgcttgaggggaagagaaaggggaaaggcgacggcgacggcggcgagcagaggggagacggcgactgctagcagctggcggctatatcgcggctgcatgctcaaggctctctcacggtatgtgcaatgatgaatttgtggttgggtttttgactggggcaacctagatctgaagaaatgttctttgtttgtttgttgtggtttctgaagcaggaatgtgattttgttagactctttttgatagactgtttagatggttgctccagacgacatccctctttggtaagattgttctacaaccaaatcacaaatcacattgttctttgaaataggggttaggaatgtgtgtgctaactataggaatcaatcttgctatggcagggttgatcccttttcggcatatcgggtatgcattactatgcgatcatatactcgaaagggtgatgtcgaagtgatttgtgatgggaaggaatgggacatagttgttgatagagataaattcaacttgattgcgcttactgatgagattaaagaacattttgaatggggaaccaatcaaaaagctagcatgttatatcttgatagtacaggacaataccttccactgactagtgatgctgcactgagaagtctggtagattcaaattttctatttcgcgaaattagtgttttggttagggtggaggatattgttgaggttgctgatgccgatggcaatggcaatgccaattgcaatggtggtgatggccctggtggtgatggcagtggtggtgatgactctggtgttgatgtcaacggtggtgatggcaatgatggtgatggcagtggtgctgatggagatggcaatgtagttgtaggtgagaaagagatgcaacaaaaagcatctagtaaatggcaagctatgttttgggatgatactcctattagtaatcctgaagatcctgaagatgaaccaattggggtgaatgaagaacacttatatggagttgtagatcttgaatctcagaaggaagggactagtggaaagaagacagataaagagaggtcaagtgggaatgaggtagctactcaggatgttccaaatgattttgacccgcagcatgtccctgaagaggaagtacctattgatgagattggcaatgttgtgcccttgtttgtgcacaacagggagaatcctacatttgttgtagatgcaacattcccaaatggagaggcttttaaacttgcaatgagacagtttgcaataaaaggagaatttgaggtcgatgttagccatagtaataagactaggtatattgcaaagtgtgctaaaacaaaagactgcacatggaggatatatgcgaggaaagagaccaaatctagtgtttggaaggttatttgactctttttcttgttattgcatatcattttttatctttttattataatattggcatctcatcctacttttgttatgcattgcagatcagtcgcttaagtgagattcctacttgtgctactacaagcaagctgagtggaagatggcatcctcaggatggattgcagatagggctaaggaaataatgaccacagagcctaacattggccccaaggcacttcaagataggttggagaagaaatataatgtaactcttaggtatggcagaacttgggaaggcctccaaaaggcaaaggatgacatccatggatcatgggaggctagctttcagcttctgtggagttttaaggctgaggtagaaagatcaatgccaggtagcattgttgacatcgatgtgaatgcaatgggggaaaaggttttctttaggaggttatttgttgcattaaaaccctgcattgatggatttctactaggatgcagaccatatctaggttgtgattctagttttttgactaggaaatatacatggcaaatagcagcagcagttggagttgatggtcacaattggctttttccaatggcatatgcaatttttgacaaggaaaactatgaaaattgggaatggttcatgcaaaggttgaaacaagcagtaggtactcgagatggattggtcatacatactgatgcatgcaagggttgcaaacaacaattagtgatgtttttggtcgaacagtggaatatagggaatgctttcgacatctcatgttgaacttcagtaaaaaattcaggggtgaagtatttgattccaatatgtggcctgcagcatgaaccttttcactctacaagtaccaagagtacatggatcagattaaagaagcatgccctgctgcttatgagtacctagaagtccaccatccacgtgcatggacaagaagcaagttttcagaagcatgcaagattgagtatgtgtgtaataatcttgcagaatcattcaatgcatggataagtgatataaaaggcttgcctattattgacctagtaaataagctaagacaaatgataatgaagcagatgtcaaggagaaaaagagttgcagaaggcttaacagataaaattcttcctagtgttgttagagctctaaatgccaagagtagaggactaaactatgaaattgcaagaagtggtcttactgatgcagaggtgacagtttttgatatgaaaaccaaaaaacacaacacttatggtgtttttctagaaaagtgggaatgcacttgtcgacagtggcaaatttctggcaagccatgcaaacatgcaattgctttcatttgttccatcagaggagctagtttggaagattatgttggggaatttttctctgtagataggttcaagtttgcatatgcaagttccattgtacccattgtaggatcgagatgtcgactagagaggaggtgaataggcgatttaaaaattaaataacacctaatcaaatctaacctaagttgctaggcttggtgagggtgaactctaactaagcaactaagttatgttttgcaaacctagggtgatagtggctcaattatatctctaggaaagtaaattgcataaatgtaaatgtgacaatcaaatgagacaatgagacaagagatttttcaccgaggttcggaaactcgccggtttcctactccccgttgaggcgagcccaactccaccgctcaaccacgaagccaccgcacgcccccttcgtcaagggtgggcaaggcgggagccggcccacggagaggactacccaagcctcgatcactcggggtagttcttccttcactctgaaggtggtgaactccaaaccactcacaaaccggcgccgggccgcctccacaatcttctcggagaggtcaccgggcaactcctccataagccgtctaggaggcggcaacctccaagagtaacaagcaatgacccggtgtggagatgatcaagtgccacactagctctacaatggaagcaaatgcacttgactcttagctaaacaaccctctaacacactagatggatgaacacaaagctcaagtgagtgtgagagaggtgcaaggggtgtatgcaattgaattaggtgccaagagagcccccttgctactggtgggggagtatttatactcccacccaccaaaactagccgttggtggcgaaatcccccaactttgtgctctgccggtctgaccgaaggtatgtggctggtcagaccgtgctactctgcaacggctagaaaactagccgttgaagtgctgtcagagggccccatcggcctgaccggtcagaccgacatggggtggccggtcagaccggcctcgactcggtcagaccgccatcagctcggtctgaccgactacggctccgtcggctctgtatcggccatcccgagcagcatcatctcggcctccagggggccggtctgactgggaaagtgccgccggtcagaccgcccgcggggccggtcagaccggctagggcacgccggtcagaccgccactatgtgccagtctgaccgcccctggtcaggccgaacccagtgaatttgcaagtgaatgtgtgtataatgaaaaagagagcacaaatgaaaatgcaatgacctaatgtggcaattaaaatcatctctttgctaggtcattacccctcttaatagtacggcgaaactaaaattaaactagcaaatttgatcgccctacacctcgatcaattctaaattaaagcgctagttttaccgtcttctttccctttgctttgcgccgtcaattttaatccatcgataatcatccatgcgcacatatgacgtggacctaacttaaaatgtatagctcaaagacaacggttagtccacaattagtgcttgtcattaattaccaaaattaacaccgggggcctagatgcttcacccatgtcagacaagacccaatggccaaaagttgacatagggttcaaaatgttgccaccaaagcttggaagatcagcaggaagacctcagaaaaatcgtgtgccaaatagtgctgaagggaaaggaaagggaaagtgcaaaaggtgctcgagatgtcaaggatttgggaatcaagctagaacttgcaaggaacctgagtgcgtagacctatctgatcttgcatctgctccagcacccccccccccaaaaaaaagaaagaaaaggtctagttttcctgcttctccttctgatatcttaatctgcattttttgtactgctaacaattttttggttctctttcaggaagaccaaacctgcagtggtagttgtctcaaagccccagacaaggtctaagtccaaatgtgatgcctcatcttcttcccagctgtcggtgacatgggaccgggagtatcatgacttagagacttgaggcagacacgatcacccacgtggcctaaccccctcgggggggggggggggggtcgggcccgagggtgatacggccgcccttctctttgtctccccgaggggtcggaccgctcccgtctcggccccgagggccgaggcgccccgaccccttgtgggttttgcgccgcgtatatggggtaggtgagcatagcggggctcacctaaccgcatttattgcggtttggacgagcgcagaacgccgcatgtaacacagtgcagcgcgctcgtttatccggtcagtgaccagtcacagaccgatcagatcgtgggttaggtggcgacaggcggtctgacgcacgcctcgccccatcccgtcaggacgagagcctccaagcactcgtccctagccggagccggcgtgttagctcctggagatggcacgttggttccggtcagatatataccaggcttcattctaaccattacaggcaagatattgtatgaagaagggcgaacatgcagattgttaaactgacacgtggtggacaagaatgatcgatttgtgaccggtctgacaatggtcatgtcgtcagcagacagccatgttcccacgtcgcgcctgcttccggtggaagtggaggtaggtatgggccgtcccatcagaaggtcattcggacggcagccatacaaatctccgtccattaatgaagagaagtcaagttggagggaagagaggatgagtccccacacaaaagaaagagagggagagatggtgcatgtggtatccccttgagatataaaacgaggaccttgcccacgtagaaagggagaggagaaaaacgatcccagaacaatcgggggctggctcacactttgtagcttcttcatacacagatccaccaaaacacaggagtagggtattacgcttctcagcggcccgaacctgtatacatcgcccgtgtcttgtgtgtttccactctcgcgaactttccacagaccaggagcttagaatctcacccagggcccccggccgaaccggcaaaggggggcctgcgcggtctctcggtgaggagccgcaagctccgtcatctggcacgccaggtagggggctctgcgagagatcttctgagctctcgcactctttcgtgtgcgccaagcttttcctgttcagcccaatggccgaacaagcaaaggcgcacaacctctctccgagcattagcggtgacgatggggagccaaacccatgccgtcgagctcgtactccaccgccccctccacgccaaagtcctaggagggaggaggtgctcgagagggtcgaaggatccgcgacttcgacatccacgggcgatggggaagggcggcgagatggggagcgtcgcctcctcgtctacggtgacggcagcacgccccagggcgcgctccaagctgcgggcgcgctcctacgtcacccgcccgttgtccctgacccggagtctccagcccaacgttggctggacgacgtggccaacttggtcatgacggcacggcagcgcctaggtgctggtgggcggtcctccgccaccaagacctctggcgctactaccaccggctccgtgtcgtcaaggcggagggcgcggcgagcggcggctgttgctcgccattcggccgccactccttcgtcagcgcctccgacccaggaagatctgcgtggggggccggatgcccgcatcagtatcgagcgccggcgtaatggccgacgtgctgcccacgcaacggagggcgcctcctcgtccggagtgtcacatcaacacggacgcggggatcagccctccgtgcccccggttggtggtgtcggctgtagagcctttgtggcgagccttcggaacgtccgttggcccccaaggttccggcccaccatcgccgaaaaatatgacgggagcgtcaaccccgccgagtttctccaggtctacacgaccgggatcgaggccgccgggggtgacgacagggtcatggcgaatttctttcccatggccctgaagggacaggcacggggttggctaatgaacttgccacccgcgtccgtccactcttgggaggatttgtgccaacagttcaccatgaactttcaaggcacatatccgtgcccaggtgaagaagcggacctgcacgcagtacagcgaagggatgatgagtcacttcgctcgtacattcagcggttctgtcaagtccgcaacaccataccaagcatccctgcacacgcggtgatctacgcgttcagggggggtgtgcggcacaaccgcatgctcgaaaagatcgcctccaaagagccccagactaccgcggagctttttcagctcgtggaccgagtggctcgcaaggaggaggcctggacttggaacccctccggttccagtgtggcagcttcggccgcccccgggtccgccgctcggtcagggcggcgggacaggaggaggaagaagaggtcggcccattccgacgacgagggtcatgtcctcgccgtcgaaggcgtttcgctggccacccgaaaggggaggcctgcgagcgacaaaaagaaggaagccgacactccctgacctcggctacttggaagagcgaaggcggcgcgcggcccttcgagccgcgcgctaccagcagagcctgcggcgctaccatcagcgccacgtccgggcccgatcactctgcgtcgacgacctcgtcctacgccgcgtccaaacgcgtgctggattgagcaagctctcaccaatgtgggagggtccgtatcgagtgatcggcgtcccccggccgggctccgttccgctggccacgggcgatggcacagagctgcctaacccgtggaacatcgaacaccttcgtcgcttctacccctaaaggggatcgggtgtcaggtttcgggctcgggccaaccccgcacccccctcgggcgtgcagggttggccgggggctaccacatatgcatattcttatttctcttacatctgtatctcaataaaagcattttcgatttcctaaaggctgtatctgtgctgttgtcgctgtcgtccgcaccgtcgtcaccgcactcctcgtcggagttgaaggcaaacgcgagccgaggggccgctcattattgtcggtcggttttcccttgctgatgcgcgcgatttgcgaccgccgggattctgcccgaagagagagagagcagggaggagaggcccccgagccgaacggcggcctaaggcccccgacgaccggagctggccctccgcctgcttgtccgacggtgccaggcgcccccgacccccaggatggccccgaggccactgcgggaaggccgcgcctgtcgccctctgaccccgaggtcgtcggcacagaagccgaatgcgccccgcgtggcctctcggatggagagcgccctggagatgtggcccctgacgaagaagatcggccccgccgaaaggtgcagcggcccgtctacttcgttagcgaggccctccgggacgctgagacccgataccttcaggcccagaagatgctttatgctatcctgataacttcgaggaagttgcgccattatttccaggcgcatcgggtcacggtggttacgtcttatcccctcggccaaatcttgtataaccgagagggtactggacgggtggtgaaatgggcaatcgaactctctgaattcgatttgcgcttgaaaccaagccacgcgatcaagagccaggccctcgccgactttgtggtggagtggaccccagctcccgagctcgtctccgcccccgaggccagctcaagcccatcgcagctgcctcacaccgccctctaggtgatgtagttcgacggcacctgtaggaaccggccccacctgtcaccaggccttagaagtggcgtcacgcccgaccgcttccctcggggagggcgatcgccctggcataacgcagggggctactgtcggtgacatgggaccgggagtatcatgacttagagacttgaggcagacacgatcacccacgtggcctaaccccctcgggggggtcgggcccaagggtgatacggtcgcccttctctttgtctccctgaggggtcggaccgctcccgtctcggccccgagggccgaggcgccccgaccccttgtgggttttgcgccgcgtatatggggtaggtgagcatagcggggctcacctaaccgcatttattgcggtttggacgagcgcaaaacgccgcatgtaacgcagtgcagcgcgctcgtttatccggtcagtgaccagtcacagaccgatcagatcgtgggttaggtggcgacaggcggtctgacgcacgcctcgccccatcccgtcaggacgagagcctccaagcactcgtccctagccggagccggcgtgttagctcctggagatggcacgttggttccggtcagatatataccaggcttcattctaaccattacaggcaagatattgtatgaagaagggcgaacatgcagattgttaaactgacacgtggtggacaagaatgaccgatttgtgaccggtctgacaatggtcatgtcgtcagcagacagccatgttcccacgtcgcgcctgcttccggtggaagtggaggtaggtatgggccgtcccatcagaaggtcattcggacggcagccatacaaatctccttccattaatgaagagaagtcaagttggagggaagagaggatgagtccccacacaaaagaaagagagggagagatggtgcatgtggtatccccttgagatataaaaggaagaccttgcccacgtagaaagggagaggagaaaaacgatcccagaacaatcgggggctggctcacactttgtagcttcttcatacacagatccaccaaaacacaggagtagggtattacgcttctcagcggcccgaacctgtatacatcgcccgtgtcttgtgtgtttccactctcgtgaactttccacagaccaggagcttagaatctcacccagggcccccggccgaaccggcaaaggggggcctgcgcggtctcccagtgaggagccccaagctccgtcaccagccactgcctacatccccttcacatcctgctggagtagtttctacatctcagccgcctacaaggacaactcctcccaggctagcaaagacaaaagcaaggacagctagtgttaggacaaaatgaaccaaaatactacctgttaatctatggacctgtatctctctatggatctgttaatctattctgtatctctctatggaccatggaccatggaccatgtaaactctatgtttgtatgcacctgttaatctatcctattatgtgtggacatgtttggtagaacaaatgcgctcaaaatctgatccttaagtattcatgttttattcctgtcacactatgcaagtgcataaacataaaaaagtactatcttgtcacataattatcatcatttcattaagattagaataattatcatcacataatctccattacttcaagtgcataaacatacaaaagtactaacttgtcacatacatcagagatcacaactaacttccagattacagcagagctcacagaaagccctttgccaccactacagcaatcatacctaaaagtacagcaccaaaaacaacaatgccaaatgctgcaatcttcaaatagagagtttgctgcttcacttcggacctcatcatcaatacaacatctataagcttcttctttgaacctaggtcttcaacttcatcctcttcagaactatctcccttgatttcttccctactagcatctccattcagcaatccatgatcgataaggtacttctggtagcattctttccaataccaaaaatcgcatggggcattcctctacaaatttaacccattcatcaccttattaggcacaatacaggtgcaaacaacaaaaataaatcacaacaaatttgtactttacctctgtgcggtttgaacacttgtagtacactcgatttgggttcttcttgctgcgggacacataccgaacaatttgctctccacaatccggataatacaccaatggcaacaatgaggagggagtaaaacgaatctgaccagtggaagaggatgatgcatgacgaggatggcggagcatggatccctcaacatgtgagccacgaacagttgagctacccgaagccgccattgccaacaagaactagggttagggtttgctgagcggaaaatgaagagaatgaacgggaaagagcaaggaaatggggaataagggagaagagacgaagggcaaatgaatccaacaatatttttctccactccgatctaacgccgttacctcgcaatgcgacggaagtgctacgggacgaaggaaaaacggtggcctgtgcttctcgccgaaagtgaaaattttgtgtgctattttttggtaccgatttctttcctgtgctatggatcgaattttctctttatataatactagtactagtatttataagacgcttcgcattcacattttcatttcagtttgcacaatatttttcagttcgtatttaataagacgcttcacatttcatttgaaacctgctcctgaactcctctgacatcggcccaccacaaattaaacagagcccaatttccgcaaacattaattaaccccaacaaaagcaatcgaaaagaagcccattaattatactttaatggctgcttgtgattttggcccgtacctgctggtaattctatcccgtggtagctcgtaaatttttgcccattggcattgaaaatctccgttcgtagttgctgataaatttggcctgtaagagtgataatttcggaccatactagaaaatgggtgcgcctttggcgcaccaactaaaaatagcccgtgaatctttatattttttcatttaggatatataaacattgtagagttatttataattagtttagtgtttattttccgacaaatatattacacctagataaacggaaaccggcaaaaaaaaatctaagctcaaaataacatctcaaaatagatgcgctttgccgcatattggatcaggaagtagaaaatattgatgtgctagcctatagaatgttttaatggtccaaatttgtaaacgtttcgcatgcagtactatttagcaagtcttcgataaaattaagggttaatttgatctgtgtcattgcaaatgtgtttattcagataaatatattacaattcgtctattcgtagccatgcaagtcaaattttacaaaaatggaaccataacttcgccgccacgtttttcatcttcttccacatctgcacggcacgtgagacacacccgttagattcatctttttcctctgtccttccctattttctttttttccccatctctatggaaccatgccatcgtaaattttacgatttaaaaatagagtaaattgcatccacggtgcatcaacttggcaggtgggtgcaatttggtgcaatatcttgaaaaatgagcattctaatacacgaacttggcaggtaggtgcaatttagtataagaactttataagtgatcatataaatgcaacaacttgcatggtaggtacgattttgataaagtaaatttaagagttatgcgacaacttaattatttggagcatttttttatataaattcaatttttaagtatatttatatttttatcctaataactaataactgaaagtcaattaaactggatttagaaattattatttcggttaatatttgagaatgtgaagaaaaaaattcttaaaggtaattggatgtaaattgtattactatgtgcaatatagttcttaaagattaaatgtaatatccataagattactttgtaatggcatattgacatcgtgaaaaaaaaactcacatatcatatgcttagccaagttgatgcaccaaaataataaattgttaagttcttatactagaacgcacttacttgttaagttgttgcactcggacgttcaattctcaagttctttcactatatcgcacccacctgtctgttgtatcgtgtgtgcaatttactctttaaaaatatatcattactattcatctatttgttcggtttacagtttaaaccataaatatataaccatgaattttagcatatttttttaatatatgcattcatgcgtataggttgtgctatggtttactgacggattctttaattagtttttaagtcacattcatggtgatacttaaaagcaaaatcaatttagaaattaaaataaacctcacttccatcctcatataaataattcagagaaattaatttaccatctttggaaattgaataacatatcattttaaattaatataaacataatcatatccattcaaagacatttactgataaattcttatgagacattgtacaattttacatctcacaaatcaacccacaaaactcaaaatattgataaaaaatgagtcgtgaattgaagacttataaacaaatcttgtcagaggttgtaacttctaaaccaccatcccaactaaagcatagttgccactggatagagaaagactcttacgattctactcgcaaattagcaaagctccttgtaaatcatccactcctcactacccaattttggaagtccaaggctaagtcaatgacccattaattgtgacagaaccactcagcataaaatttatgcacttcactgcgcccaaccgaaattagccacccaattgccaacccagtactaacctaggggaggagggatatttccaacataaaaacttcctgactgtatcaaaattcaatgcaaactcactactccctccgtccctaaatataataacttttagctctcaagatttatcccaaaatataataacttctacatcaacattctcttcccaaacaatcacaacctccaccattcacttttcccacctaccttcactactcaaccaatcacaatcctccatcattcacttcaacctactttgttaataaccgtgcccaactctaaaaatacttatattctgggacgaagatagtacttgttactgtaattttattaaacatttgatcaaagaaaaagagaaaacataggctatatttaggcgttggcagtgacaggctggactaagcagcttcactataggctgccgaggaatgcagaacatatgtaacattggttaggctgtgtttagtttctgaaattggaaaaaaatttagggaaagttggtaatttgaaaaaaaaagttaggagtttatgtgagtagaaaagttttggatgtaatgtgatgtgatagaaagttgggagtttggggaagtttggtgtgaactaaacaggtcttagtttcctccgacaaattacaaggcaactacaagatgaatcccagaattaccttatcccaaatcttgccttgattttttcccttcctcttggtaagccccaaatcttgatttgaactttttctaggctctccctcaaaagatacggagctattcacgtctaactataaagtaaaagtagagtaaatgactcgtctcaggaagaatacagcaaagcaacgttcgaaaaaaaaaagcaatagcaattaaagctactatgttctgctcttggtaagatcatgcaaaatcgatgccaaagaacagcacagctcgagtaatttcagccacaattaaagctttattcagagtgaaagcatgatttagtatgttgggccattgggctgaagagggcttggttggcatgggagtaggcgaggtggctgaggtcaccaagctgcacggacaaggcctgctcggcgccaccaggaagcagctgagcgctgaccagctccgacgtcatccgactgccggccgccaacagctccgctgacacctccaaaatcttctcgaactagggtggtgcggatggggcaacccctttctcctcgctggtccaccctggatccaggcatccaaccaccaagcttgcggcggcaagctctggcacctccgagctaggcattgttagatccggtaggagcagttgtcgtctggaagcggcgacgtgcttaagctccaccgagatgtggagggaggcgtgccgaggtggcgcggatggagagaagcagcggcgggggcatggaaaaggaggagtcgacggccggggcaggaaggaggagaaggggagggggtgcgggcggcgtctccgccaccaagcgcgccgtcacgtgagaggcgaaggaggcggacgatgtgctggaagactggaatatgcgcgaaaggttatccagatcgacacttggcagatttttgggtgaggtctaaccaaaattttagggcgccacgtggcccaatcggaaggcagatcctagacccagaaatcggtattagagatttgctggtaacttgggtcggtagttgctacttgctagtgcagaagtctagagttgaggcgttcactttgctgccatttatcggtgaaactatgaatatgacaaatttgggttatcgggcatgactagaaatcatgtgggctctacccgcgcaggttcgaatcctgccgaccacgccctttttggcttttctgtacgaacatccccaagactcctatttgctttttttttttgtgttcattttttttatatttttcagtttcttcttttgcattttttgtgttcattttttgtgttagtattgatgcattttactatttataccacatgcacatcccccattttgctgcattccttttatatatagttttctttattatattttcagtgcattttgcttttctgtgtgtgtaagaataatttttttttctatttataccacatgcacatcccctaggcacatactgtgctgtgctggtcctggtcagctggtgcggtggtgcctggtgtactgtactctttgtccattgagctgggccgctggactggcttgatgggcttgatgggctggcttctccaggcctccagctggtttggctagtttttaggaataagttcactttgactccattaaaagtgatccgaatctaatccatacccctaaactataaaaccagatatcttgacccctaaactgttaaaaccggtgcaacttgactccctcggtagttttgaagagcggttttgctgacgtggcgtctatgtggcaatgttcaccttgtctgccgttgacgtggcgtttgggtggcattaaaaattaaaaacatacatgtgggacccattcgtcattcagaagaaaattttgtgggtcactgacatacgggacccactgatatctgggacccgcacgtcatcccttcttatcctccctctttctcttccttctctctctcccccacgcggccacgccggcgtcatgagtccctgtcgccggcgcctccacctcgccactgccggcacctccacctcgccactgctggcgtcgtcctccccgacttctccatcggggttcatctcctcgccggctccgcatccatcgcctcgagtcagcgtgggcggtgacgctggacgagctcctccgggacgaggccgctgccgccgccggggggtggaggtggacgccccgtgcgcgtcctcgtctacgacgcgttcctcctctgggcgcgcgctgtggcggtggcgttcacgttcttcacgcagtcgtgcgccgtcaacgtggtgtacggccacgcgtggtgcggccgtgtacacgtccccgtggaggccggcgccatcgcgctgatcggcttgccggcgctggagctggagggcttgccgtggttcattaaggtcggccccggcccgtacccggcgtacttcgacttggtgatgaagcagttcgacaggctggagctcgccgacgacgtgctcgtcaattcattctacgagttcgaacccgagctgagctagtaaccccatcaaagctacagtagcaactatctgctggtgataatgaaattgcagacttgcctgcagcttgcttgccggcgtcactgttggcttgcagctggcccgctgctgtctgccgcctcccgtgcacgcccgcgcagtgtcacgccatcgccatctactgtgcgtgtcacgacatcggctcggaacacaagtcaacccaaaagatcggaccgaccatgtacccacagagtgtgtggacccggtagtcagagaccgggccacggtaagagagagagaccttgagcacattgctataaaggtcggcaggattggagagagagggatatgaaaaacattgtacacaacaattcccaattgattcaaatctctcttcctgctatcttgttctgttctttcttcctcctcaagctgctctttcctccctccaattcctcaaatctccacgaactcgctgaagaattagtgtactcatgacaatttggtatcagagcatcgatcctggagaagccacgctatacatctcgccttcagctgcaggtcgaagcgatggagaagcagaatatcgactttggcaaggtcttaatggagattcaggagtcgcttgtctcgctgaatcgggcgcaaggcgagacgcaaccgccgtcaacaagctggaccaaggcgtgaccaactggagaccgcaagtagaagcggcagtgaaggagttgcgtgaggaggtgggtgatatccgccagcaaatggacctgctcggcaaatcgcagtccgcgccgccggcgacgtcttcccctcgagttccgttgacggacgaggaaaggaaggcgccgttgcttcctacgccaccagcttcgcgcgtggctgcggcgggggacagcggagacaagtgggccagtggccgccaacatccacatgaacaccggggaagggcaccaggtgtggttaccaccgtggtcccgacctcggtcaagggtacgttcagttcacctgctccatctttgggaattttggattgggaaaatgattttgattcgggagagcgtaggtttaaccatagagtccctaagttagatttcccaaaatttgatggttcagatccacatgattggagaatgaagtgtgagcattactttgatgtgaataacacttatccagggttgtgggttagagtctctatcatttacttttctgggagggctgcttcgtggctgagatcaactagagctcacttgcggttccctaattgggaggatttttgcgctgcagtatctgataagtttgatagagaccagcatgattcgctaattagacagatggatcaaattaaacagacgggttcggtttgggagtattatgaacgattcgatgaattgatgaatcaattgctagtttatgatcctggggtaaatatgtgttacttgacacatagatttattgatgggttgcgtcgggagattagaaatgctgttttacttcagagacccaagaatctcgagtctgctctggctgttgcttccttgcaggaggaagtgttggaatcatctgactccacaccggtgaaggagggcaagaagtttgagagttctgggcagcacaagactggtggaaattttaagggagcttttcctttaccattgcctcctggtcgtcatttgggggtaattcagagtgcaagagtggatgagaagaaggaaggggaaattaaaagattgtctgcatcttcagagaaagtgtcagctcttaaagcacagcgtcgggcacaaggattatgttacatatgtgctgagaaatggtctcccactcataagtgtgctaacactgtgcaattgcatgcagttcaggagctgttttctgttttgcatgaagcttgtgatgaggcagtttgcaatcctgagaattctgttttatcggacagtcaggtgttgatggcaatctctgtacatgcagttcaaggatctgaagctagtggatgcatgaggatgttgggtcagattcaaggcaaggacgtttttattttggtagattctggtagcactgcaagtttcattagtgctcgagtggcagaagggttatcggaactttctcagattgctactaatttgcaagtgaaggtggctgatggagctactttgcactgtcagtctgaaattccggcctgtgaatggagcactcaaggacagaaattttgcactactctcaagatattaccattgggaaattatgacatgatattaggaatggactggctaatgcagcacagcccaatgactgtgaattgggttactaaatctctcacaattgaaggcaggaatccagttgttactttgcagggaattttgtcaaacactgcacagtgcggacttattccttccaaatagttgaatgggttgaaacatagacaggcagtagcaaatcttgttcaactgtgttgtgttacagacctggaaccttcagaagaatttcctcttgcagtacaacaggtgctaaataaatttgcttcagtatttgaggaacctcagggtctgccacctgtgagatcgtttgatcacaccattcctttaatccctggagcaatgcctgtcaacgtgaggccttaccgttatactccatcccagaaagatgagattgagtctcaagtccaagaaatgctgtctaagggattgattcagcccagctcaagtccattctcttcacctgtgctgttggttaatttcttcctcctcaagctgctctttcctccctccaattcctcaaatatccacgaactcgctgaagaattagtatactcgtgacacgcagtcgagccattcgtcgccgcccgccagctgctcgctatcgtcacccagcgcagcttcggccctcaccgcccgccgccggccgaagggggaagaaccgatgagaaagggagagaaagaaagaaggaagagagggaggaggaagaagggatttatgtgggccccacatgtcagtgggcccacaatttcttttttgaatgacaaatgggccccgcatatatatttttaattctaatgccacttaagcgccatgtcaacgccacataggacgaagacctagtcaatactgccacgtagacgctatgtcagcgaaaccatcatccaaaaccgccgagggagtcaaattataccggttttaatagttgaggggtcaagatatccggtattatggtttagagtcatggattagattctggtcacttttaagggagtcaaagtgaacttattcctagtttttattagctgtatagctggccatctaaggtgaaattttttgcttggagattatcactgaattccatcccaactgagaaggtgcctaagcaacgaaatatgagtacaacttgtatatgtaaagtttgtggtgctgcagaggatacttgggatcatgcacttcttcattgtactatgtcaaaatgtgtgtgggctttgatggataatgatcttgcagaactaattgcaaccacgaatattaaagatcccaaggattggctcttttacatgcttgatgttttaaaacctggagacaggacgaagctacttgtatcatgttgggcaatttggcgagctagacggagagttttgcatgacgaattttatgaaagccctttaacaagaatgcattttattaaatcatatttagctgatatggatttgattaatattcctctatgcctacaggataagaagcacttgacttatcctaaagtaccagtatggatgccacctccagaagattgcgtaaagataaatgtggatgcagcaatatcacgatggggtaacaagggagctgttggggcagtgtgtcatactgtatctggtgaatttgtggcagccagtgctatggtctgggaagggctctctgactcggcaactttggaagcacttggatgcaatgaaggcttggcaatagctatgggctgtaatatgtcagaggtctgtatagcctcagactgccttgaggtcattaggagcatctcaaagaaaccaaggtgccaatatttagcagtcctaaatgatattgaggcaagaaggaagcattttgcaaaagtagagtttcgtcatgaaaatcaggcttgtaattttgatgctcacaacttagctaagtttgcttctactttacaggaggggtgttatctttggttttcaaatcctccttgtaatatgaataggaatgtaaatgtggacagtaataaataaattgtccgctctttctcaaaaaaaaaaaagctgtatagctgaataattttgcgatcagtgttcgagggtacaaatgaatcagctattataaaattgagaactaggtcaaacacagttttttagaaataatttatacatattattttcttataaaaactacactattagaaagctaggaaagcatatcacatttacatacaatctattaacttattaaagtaataaaaaaagagcctttacatttgctccaacggcctagatatccttatattaattggatagaaagaaaaaaaataaagtctatagaaatataatttaagaaaacaaaaaattcagaattaaaaaaataaggaatattgaaaaaggatactagagtccatgtatacaatttaaaactaattgaagttcgaaattaaatgttaataaaattaaagctatatccccgcaaaaaaataaaattaaagttataggttacatagttcatatagaaatacaatataaaagtaaataaaattattttttttaaaaaaatattgggaaatagtttatagtccatatagaatataatttagaaataaatcaaattaaaaattaaaaaataaatattgagaagagtctaaggtccatataaaatacagtttataaatataaattaaaaaataaaaataagaaatattgaaagagaaatatatagtccatataaaaataagataaataaggaatattgaaagaaggggctaaagtccaaataggaatataatttaaaataactaaagtttggaatttaaaaataagaaatatgaaaagaagggtttagagtccatatgggaataaaattataaaaaaatgaaaattcgaaattaaataataaaaaatattggaatggtattctagagtccatatagaacaaaatttaaaattataaaataataaaccactaccacatatatatcacgttagtttggtaagttagtacataatttaaaattatgttatcattttaatatattctaatagtaaaaatgtgaaaatctatatataatttcgtgagaaaaatataacaatctaccgggtgtactgttttaccaatcggagaagaacccacgacgaagccgccgccaccgccgcgcatcgtcttgtccatttcgcaggacagaaaaacaggagttcgcaggtggcacgctgcgttcaccccgcgatcctagtgatctgattcaggcgactagtaactggcaccacatgatcatggttgtcactcgcggctgtcagacagcggagcagatcagcagagcaccatatgcgccatgcgacaagctagcccatactgaactagtgctaattaaattcctaacgggttatcaatagagcggttagctagcataagccttgattatagtggtaaagtgggggagtgaagtgcgctgctgttgacacttgacaggtagctcggccttcttttctctctctctctctctctctctctctctctctgggattctttccgtttgtcttgttgtatctatcttctgtctccgacatgaggtggagagctcgtatttggtggggggccttgggcaaggaagtggacggccgacgtgtcacgatgagccgcaataattgtgctcacaacgtgacaattagcagccagtgttaaagcagtgaacatcacccccacacacagctattagtattggtgtcgcagttgcaggatcctattggttacccatggtttattataaaccgcagcggtttattaataattaaaaaatagtttatagataaaacttttgcatatatattttttaactattcaaaagtaaatgttgaaaaacattaaatttaaatttaaaatttaatttttgacagcggtttataagtcatgggggttgtgtagatgtgaattgtgatcagggtttacaaaatcgtgtggttaaacttcttatttttaaaatcacgatatatctcgtgataaccgcacggtattcacggtaaccacgcggttaccgctagaccgtgggatcacggtaaacccaccccaaaacgctttggggaaacttgcggcctgttatttacacttaaatcatgccacaaatatataaagaaatattagtagtactaattaattaccatcctaatttagaccatctttatattggccatttccgggaacccgggggagaatatcacaggacccaggtgtacacagctccgaccagcttccttcaccaataccgttgtcccacctggctaactggctaactttccttgtcgcgtacgcagtccatgtccaggggccccacctgcagcctcacatcacaaagccatcaaaacccccaccaccccgactccgaaggcgaaggccagccaaaggaaaggagaaagcgcggccatggcggaagacgcgccgccgtcgtcgcttccgctgctgctgccgcggaagtcgttgtcctcgtcctccgcgcagcgcaagcagcagtacgcgcggtgcgtgtcgcacgctggggacgagctccacagcttccgctcctgcctcgcgtggatgtgcgtcgaccactccacccgcgcccgcggcgccgcgtcgtgggcggccttcctcctcctcgccgtcgccgccccgtccgcggccaccctcgcgctcccctccccggtcggcggcggggggtcgccgttcgacgggcaggtccaggtgtcgctcaccctggccgccgcgctcgcctacctcaccctcacggcgctcctccagggccgcggcctccgccgcctgctctacctcgaccgcctccgcgacgactccgaggaggtccggtccggctacatcgaggagctcgcgggctccttccgcgtcctcgcctgcttcctcctcccctgcacgctcgccgaggccgcctacaaggcgtactggtacctcgccgcgccgccgttccgctccccgtggtggtccgccgccgcgtgcgccgtcgaggtcgcctcctgggcctaccgcaccgccgtcttcttcatggtctgcgtcctcttccggaccatctgctacctgcagatcctccggatgaagggcttcgcgcgcgagttctgcaggttcgccgacgtcgccgccgtgctcgagagccaccgccgcatcaggaagcagctccacaggatcagccaccgctaccgccgcttcatactctgctgcctcgtcctcgtcaccaccagccagttcgccgccctgcttgccaccaccaggccgcacgcgcagatcaacctcgccaccgccggcgagctcgcggtaaatcttccttttctgctcctccttttttttttacttccattccgatttatgttaaaaggtaagcagtaattgcttccttcaccgagaaatcaaggtgatgcgattaccgatttggtatgaagatatcagtagcatcatgaacgatctgaatcagaaatatgcattgttcaaagatgcgattcactgcataattagtagtagcatttagcagtaagtaatcactacaaatttatctcttcaagataggaaaatgattcggtggaaatggaaaccgcaattggatacatgtaaaattgggacaggaatgatgagaaggggctgaatcgaagcagtttttagtaactgttaattctgctctatccctgtttctttctacaagctcagaaatatgaattccgctgttggggatagtgaaaatgccagatcaggttgagcaaggtcaagtggctactggctagccacactgtaagtaaagttagtcctagaagaagcttgcacgccctgaaaaggaagcacaaatgttcagataactctagaagtagaacagaacagtgcatgaacctccaccacccaccacatgtccacagcagacaactagatccacattcccatcaccactccatcagtagttgtctgtgtctcaaaagggctatacagctagctagatttgtattgcaaaatgttaaaagagacaaattccctggtagatgcttgaggaaatgcatattcctgaagttgaatatagaatgttatccttcaaaagtaagatcaggaagaacaattaggttgcaaaatggaatgttggaatttctgataaaactgaagtatattttatagtggtcattcagtgggcctttttttttataatggataaaacttggtctttgtttcagccatctgttccttgagaatcattttccatattaaacataactcaatgtgtttgctctgatagttaacccaggaacccagcagtaaatccctgcgttcatcgtgaactctgatttttaccgtgagacttggaagtttttgccgggggacttggaaattttcattctgtcagccactggcttcagtggcctcggtctgagactcgagtacctgacatctgtttgtcgcttcacatgttgtgcagctctgctcgctgagcctcgtggccgggctgctggtgtgcctccagagcgcggcgaagatcacgcacaagacgcaggcgatcacgagcgtggcggcggggtggcacgccgacgccaccatcaacgccttcgacaacgaccaggaggaccccaacccggacctcccccgcatcgtcggctacctggtgcccgtgaacgcctactggatggcctccggcgagtcctcgtcggactcctcctcctcctcctcctccagcgacgacgacgactccggccaccccaagtccaagtacatccctttccagaacaaccactgcttccagcagaggcaggcacttggtaagcgctcacaacaaaacaaaacaaacaaacaaaagaacaaacaaacatatgtgaaagctgcatttcatttcatcagttcgtcctgacctgatcgatgtggtggtggtggtgttttttttgtcagtgacgtacctggagaacaaccgggccggcatcacggtgtacggcttcgtcgtcgaccggacgtggctgcacgcgctgttcatgatcgagttctccctcgtcatgtggctgctggggaagacggtcggcatatcctgaggcctgaaggagcttttgcctcctgttgaagctttcagctctctctctgctctgcagccgtgccgagatttctgatgatcaaagatctctgcatcgtctcatattgcttcctggattgtacaatacaaaatcgagtgcagaaattgcagataatagttcagtttctgtgccatgtccggcacaaaaacgaagcaacagttctgaagtttttagctgtatgtttttctttaaaaatttttatggttctttgtttgaggcagattctgatggagcattagttgtatgaaaaataatgggatgggatagttgtccagcttgatttgatgagattatgagagaacagtgatcgttgtatactgtataggttgatttcatgaaacgattacagtgatgttcaggttgacttttttttttccagatttgttcaggttgatgttgtattcttgttgcgtaggaatctctaacgatgaatcatggttcttacaaagctcaatgacatcccttcctagtgattagatcatttctcatataagggcttgtttagttccaaactttttctttaaacttccaactttttcatcacatcaaaactttcctacacacataaactttcaactttccatcaaatcattccaattttaacaaaattttcaattttagcgtgaactaaacacaccctaaatgtttcgcaaaattcaaaattgccctgtttagtgcacaccaaacttctcccaaacttccaactttccatcacatccaaaacttttctacacacataaactcctaactttttttccaaactactccctccgtcctaaaataagtgcagttttgcattgttcatgttcaacttttgaccattcgtcttatttgaattttttttatgattagtatttttattgttattagatgataaaacatgaatagtactttatgtatgactaatttttttcaaatttttcataaatttttcaaataagacgaacggtcaacgtcggacacggttccccacgactgcacttattttgggacggaagtagtaccaactttccccaaacttcttctcaatagcaacaaactgatatgactgctgtagcgttcctgtcaaatcaacagtaacaggttgcagcatggtaacaacaaacaaaagatatgctcatggatgataataatagctaataagtcgctaggatcaaacgtgcgatccactagaacatggatacaaaacggcagcacatgacaagcaaatatgcccaataagttttcatgatgttcatgttttggaacagcaatcgctgccaaacaaaaaaacccatttgcgtcgatccaatggaaggaaaagaaaagggcattcacaaaatccatgcaaggcagcaccggaaaaaagcagcactgtttttgccctatataggcatgagcagtgccctaacagagatctccgtccaacctgtatcctcggttgctgcctgtctcagcaaagaaaaaggtactggaagaacatgatgatcctctgaaaaccaggcatcaaatgccgcggtatgttattttgcctcccttgcggatggatagaatgaacagaacccgtggtagctccctttcttagatgccatgtgttgaccttacatgagtcaccacaggatggtaccgccgcgaagtcctccctatggcccgaataccactgacacgtccccttcgagtgttagctgaatcatgctggatatcagaggcagcgaccgagctagctgtgacattacgcctaggcctctccctgtaccttctgtaagctctggtgtatgaatcaccactggcaattctcctgccatggccaaataaggatgccaagaagtcaatgctgtcatccaaactactatctgatgactcatagaagtcaagcctctcattcagagtgcgatctaaggatgtgaagaagttgagcctctcctccaagtcatctccatcagaaagtaaattgttgttgctgccaccattaaactcaaccacataatctcccataatgacagcccctggggtcatgcttctgatagtgctaatggcatcctgccgctctctttcacattcaaactttttccactcatctgcatgtgcaggatcaacttcacgaggttttgctgaaggatgcttggaattcacatgcttgcaaagttctttgtatgaaccaatgaatgagcagccatcatgcatacaggctcttttcttgcgattgagatactggcgagctggttcgaccacagtccatcctttgacatccccacgacaaagagggcatgcaagttccattgcacattgttgcttgctggctggctgagaattcaaagataatgaaaggccaggtgaagactcaattaatacactgtgggccaacttctcctttgcgtaagcttctttgaagtgttcgaggcagttagaatgctggtggttggtaccacacatatatggccggcaacccttgtggtgagaagtacagaggaggaggacagcatcatgtggatgctccaggcaaactgggcaagaagctcctttccattcttttttctcagagaccaatgctatatcattttgctcgcatgttcctttcatcttccagcagcaggaaggtaaatcactagaagatgaagatgatccacgtcgacgagctgggaggttccggccccttggagatctacccatctcttcaaaataatataagtagggaactgcaggatggaaggacaattatatgtcaatgctacatattaaaattgcgactcttgcacactattcaggtgctactgaagaatgcatggacataaaattaccacctgcacttaagtttaggacccatttatgttaatgacttaatgctacaaattaaagttgtgactctagcactctattctagtgatactaaagcatgcatggatataaaatcactgcctgcacttaagtttaggacccatttcgaaagtatgattctctcaaagatatcatacgagacaccatatccagttagtaggaatttctgttctatgtaatcccaatgctacaaacagggccttagatattcaattgccaccagaataaatggtaggaaatttacatattttgttagcaatagatatgatattctttgtacagactgctagggcaacttacttttgctgcacagatcctatatacaaaaagctggagattcttatggagggtaacaaataaaggatggtttcggcaaattcccctcccatgcatctgattaacttgacaaacatggtggaaaactgagactgagagacaaggagcatccagcatgaaggcaagctacccagtatgcattcaccactacaaccacacttatcttccatagtccgcattcaccactgcagtaaagccatacttatcttccatggaacatattagacagcctgaacatcacttggggacatgcacaaaatgggggaaatgcaataaagagaacatgaaagaagtttaggtaaatttatttaattcaatctgaagctatgggagttttctttagtgtaaattttgtatcatacctaaatgtctttaggatattaaaaaataattatttccactagatatgtcccaaaaagcgtattgggaccttcatagtttaaactcaactggcctttcacatgaagcttgctaggcatacaacggaaagtagtagagtatgatacaatcaatattgaacacacaaaacacactaaaaaaaaatcaaaaccaatcatcaaagctatgcatatggaaaataggtaaaccttcaaagctctgtaatatatctgaaatgaagcatcaaaatgaagaagaaaagagtacgatatttttcacatacatcagaaacagatttagcacataatgtaacacaaacaattgtacaggcacattcccagtggcggatctaacatgggacatgggggttcggttgaaaccccccaaacctttttgggaaccatcaaactgctactagtattaaggttaaggcaaatttcaagaacggaagctagggttaacgcaaattcgagaaagagtgcgtgggtcgagagagagagagagagagagagatgggaaagaggatctgcgtaccggatgcggcggaagcagcagggcgagcgacggcgaccctcctcgctcgctcgctcgccggatggatggatggggatcggcggaggcggaggcggaggcggcagcggtggggaagggcaaactgacgaggtggaaactcacaggattacagtactcactcactaatggtgagggtaagttagtaatttcgcctagtacttaatccccccggattgtttgcacataccatccccacgaccccaccctacccaaacgtggaaatctgaaaatttgaaataactagaaaatgagctgaccaattataactcaatatttgttatttacggtgtgtttgattcacggtcatgcatggatgggatacggccattcatattttattgaactagaataaatacccgtgtgttgcaacgggtgaagtctattttaattttgttgttgtcatatagttttagttaagatgaaattcgctgtgggagttcgcttggatatatattttattagaaaatcatgagctgcagttagtagtccgatcgtctcaagttagcatgcgagtttttttaaacatatttcttatatgattccttttgtattactaaaaagtgaatgatcttaaaaaagactcagatacggatatgtattttcaaaagtaaataaacttaaaaaccgactaatacacggatgacgtatcaaaataccgacaaaaacatcttcagtttttataatagtagagatatggcgatctaaatttttgtttggtttgtatatatatgatgaccaaatttcttgtttggttggagggatatagtatggatgggaaaagccaaaagtttgtcatatatatttttttatcaaaatataatcatccgatatcttatttaaagatttaattatagtaacaaatataattgtgtaatcaaatcataaattagataaatggtttaggagaaaaaatttttggagctttcttaacaaaaaaaatcaaaccaaccgcgaccaatcagaataggacaaaaacttgatggcttcatccaaccaaatcggtcggatgcactcatccagcacattgagggaatattccttattccgggcagccccgtccaccctacccttcaaccaaaaaaaaaaaggcggccatctcctatccaggctacatagtttctcatcatgtgttggttagcttatcggttgtagccaaaataattaattttttagtggctttagttttcttttcatcatagattattttccatcattttcttttaaacccgctactaacattgatatattatcataaattatttttattgcttagtttatttttatatgcttaccaataatagctcaaacgattaataatatatcctgattagtgggtttattgtgctatatagtcttgttaactttaataaatagctcaagatggtgttagggaaaaggttgagggatgtttttgataaaccttgagttccactttacactcacggctgttgttggcccgatctttcgatgagttgataataactacgatttaggagaaacgttgatgacccgactacaatcgtataagacgttgcattgcgccttatcgatcgatacacctctccgtgggttgttgatcttgccgatacagatcaaccttattccagcaataaaagcaatctgaattacaaataggaattgatgcagatcaaccttattccagcaataaaaagaaagcataatataatctagaatatatatccattttcttcttgtttttattagattaatttcaagtaacgttgtcggagacaaagtttatttcaatatgcagaatgaggataaaccgatctcatgaggatatacgcatttgtgttgcttacctaattggttaaaaggaaaatatttcttcactaaatcaacacttgttaaagagagttaataaattaatctcagctggtagaaacaaaggggtggtaaatatttttgcaacagcaccaggtggttttagcaacgacgacagatctcctcccgctccgtgccagtcccggcggtagcggtggcggccaaggcggaggcgaggaggcacgttgggcggcaggcggtggcgaagaagatggagagttcgtccgggtttgacttgctactgtgcattcggtttgttttactgctgatgtgtgacctacgtgtgggctactgtactgcagaggtgcaagggaaaaacagtcaggtcactatggaaatggatcctctgactttggctacaaagtcacggccgtgcagttgggtgatatcagccgttgagccaatctgacggctcttatttacgtgcctttgctgattgccgaagcaggccaagccggctgtaacatcttcaaattttaaactataatttgattgcatcatgctggcttttgactagattagggtaatttaaaaatttatttgattcttaattggtttaagtgttacttcttagaactctactaatttaccctaactattccctttattttaaaccttagtgaatttgagcaaattctctcaaattccaaacttcaaattattcccttagtttatcctattaatagtgagaatttgctatacttcaaaccctagtgaaacccctccaaactcagagattaaattcattcttttctagggaaatatttaaaaaattctgaaaacactgttcattgcactcaaggtgctcgatgaaatgcctagcccagctagagcagcccaacctctacccaatcttgcacaaagtttagatatggtccttggggaccacaatctactcaaagccgtggttttctttgtctcttcctccccttcacgcatgctgcctagcgtccgacttagccacgcgccgagccgccgcgtgtcggcctcgggaccgcttgcgcgtgcccaaccgccttggcgcaccgccagccgcacgacgctctcagaccgccgccgccacaccaattttggcgacgacaaagccgggactacctccgccgcacgacgccgtgcacgcccgtccaaagccgccgccgagtccgattttgattctacccggggtgaatcgagccaagacttgccgcacggttgaattaaagatagactgtggtttcccctctcacaattcaaaccaatcaccgccgagccggccattttaaccctcgtcgccgccgcgcgtcgcgcctagattggcgccaacacgtcgccagtcgtttctacccgtggtcaagccaatccttcgtcggtaagtattcgaacgtggcctcccgccactcaaattgatcttgcccgccctctcacagcctctgccacctttgccccatccaattcccgagctcatccatggcgatgatggcgtctgagctcatcctttccccctggccctataaataggaccccaatcccttccttgtccatcatcgatcatcaacaaccatagccccacaaccccgaagctttgcttcaccaatccatatcatcaaccattctcgctcgtcggtcgaacaccttgtgcgcgatcgactccacgccctttcaaccatcctccaccctaaataacccttagaacatcttatatcagctatgttctatcatactaagtcctaaccgaagccctgcatcgagctctacctcgccgcaccgagcggagcaccgtcgcccctgctctgctctgtttttcgccgccgagaagtttttccggccgcaatccttcatctcagcttatctcggtgagttctttcgtttaaaccatctatatactccctagattccattttagcaattagtttgcactaccatgccaccctctgggctgccgacgtgagcacgatcgccgccaatggaggcgctcgtcggcaagtattttttgcaccttgccgaaggtcggcaagctacctaaatccctctaggaacttcgtagatgctctaggagccctccccgagccttgtctaactctcactaccccgaacaccttcacagcttaaccatgtcaccgccaccctagccgccagcccaaccacataccaaattaacccctccgctgccgctcaccatcgctggagaaccctagctccctcccctcctcggccgcaaccccttctctcctctatcgccgctgcaatcccaaaccctagcgccgccggccgcatttggggatcggctggaggttgaagaagagaagagagagagagagagagagagagagagactgacaagtgggacccacacacagtgccatttcacatttaattgattttcaaactttagaagccaatatcttttaaaatatagatccaattccagtgaaacttggacaaaaattcttctaaaatcattctctatcttttgagaccccttttgctatttttctattttattctattttctctatttttcttatttttggattttatttgaattccttttgaatttgaattttatatgtctaaccctaggtcttgaggattcttctgacatactagataatatcagtcaatctcaggacattgagcaaggccagttactatacaccttttgatcatttaagcctatattttataaattatttatttatagccttctattcaatactctattttatatacacaatttaaccatagaaacccagataatttagtattgcttattttgcttacaatctggctaaaatatcttatccttagattgggacagtacgttagaattggatgatttccgggtggatagtattgtctcgatcgatatagttattaccaggtacttatgtcgaacaaacgggtacgaccgcagtttctagaatgcggacagacctatttattatgttaattagcaatgtggtacctctgtatagtggttcttatttttaagtcctcgcacaggaggcaactatagccgcgaagagcaaatttaaccattaccatgtataggtaaatggtttgtgatactcaagtataaattatatggtatatttctaaaccctgatcgagatgacgtggtgtcatacgatcagttccctttgaatacctcaggaacgccagaactcctcttgctgctgttaacattacgttcagagcatatgaggatataagttcatggaacagttgccacaattgttaataacctaatactgggccatgactaaagctgatgattatcatcaagtcgtggactgctggtaaatcgtacatctgctgcagtagaatatctttgaaactattcgaatagccgtactcatggaattgagtaccgggactcatatggtaccctggttagaaatttaaagtctacgtatttataaattcttgctataattcttccaaattgtttattactgctttttgcaaagaaccctactatatgctaatgcataacatatttccatgataacttgctgagtattgtgaatactcatccttgctcttataacccctttttcagatttgggtcaagaggaggacccctatgactattactacgatgaccccgataacttagagaatccctagaggttatacctccctagtcagaatgtataaaaacttccgctgtgtattagttctacatatgattaattaggtgagtacctattattgtaaaacccttagtattgtaaaactttaacgtatgcaatgaagaaccagctatattgtatgtatcaatatttactgatctagagattgatacattaattttagtcagatccaagtaattagttctgggacccgacaccggcccatcaactccacgatggtctttcgctgtacgttgttgcctgcaaaataaggggtactagcagatgagtgaacttcaatctaaggacaaaactgaatacataactaaaataaaggcgatgcattgtaacacaagctccataactaaataactagttttcaaaaaataaaaaaaccaaaataactctgtaatattaaggtatcacaaataataagcatgtagtagtcatattttactgctcgatccataatgctctctactagtcttttcttccttacttcaccacacagaaattggtccatggtaaaaattggattttcagttgactgcttcttttacaacgtagaagggaagaaccaagacaggaaaaataagatttggagtgttatattcggtgataccttttattagaaaaaaaaactctggcgacaaaataagaattggcgtggttctacagagctgatgggccggccaagcttgcttcagcgatcagcacaagaagcatataagagccgctggattggttcaatggtggatacaacgcggactgcacggccgtgactttgtggtcgaagtcagaggatccgcttccggtcactattatatagaatgacatgcctaaattctgtatttggtttcttaccataaaaggtggacacacacgatctcatacaatgcatcaaacttatatgttatcgtgaacgtcgagttacacttaacatgtaccagtatgcatatctaaccaattatgatctaccgatccgaagagcctaaccaaaataggtcagcatgagcaacatcaagacaatgaacgtgtgctatgtgaatcttctttatatttgttactaaaaaataatagcatcttactttggaggacaaaaatttattagaaaaaaatccaaataaccccatagactttatttgaaagtccatctagcattctaaagtttgaaaccttacatttagcatcctaaattttataataccgttcatatcggtccctaaggtgtttttacaaagtgtttttttatttaatttgcatatacattagctgagatttgatcatgtgacatacgtactggacatacatgttaaaattttcacttaaatataatctttctttttaccccttattcgctcttacttacaagaaaagtaccggcgtaacaatagtatgacatcactgtatattataaattgacaacctacaattgatgatacataaatatattatattagttgtttaaagccgtttgtttaagttcctaaatacacaaaaaccactatccaaaactgaacagaggtatgcatatggttgtttaaatatcatggcagacctttgttcggttttaaagtttagggtgccaaatggacttccatttgaagttttttatgcggggggtagttggattttttttttcaaattttatttggtttatatccatataggaaaaatttcagaaaaatggcatatgtatcctcgtggtgaaatttacatctaactttacttttgaaggtttttattcatgcatcgattttagggtgtctatccttatagactttttattgtgatattgtaattgcctttataagctcattaaattgggcaacaattaggacaaataaatataatgatattccacaaaggcctataacctcgatagtaaagctcattcgtcaactttggcactgaattatcctctgctgtcaccttctatgcttccatctccttgtatttgtcttctttctctctattcacagtaaatttaacctaaccacacatattatggtctaagttacacaatatcacagaaattttagcatgtgacaaataatcataaaatatcataaaaccacactattgatcattttgactttgatctaacacatttttagttctacaatcacatataatattcatgagttttctttatccatcatataaatgttgcgtccatgtatgtatagcattttaaaattttgatataggatcatgtcaaattggttaacaatgtggttttgtgaagctttagaaccataatacctgggattatgcatcacgtgtcaaaatccccatggttttgtgcaactttgaccataattaagtggggttttatgaaatttactcgttttttttttgcccctttactagaccagcttagcatatggataaataatataagatgatttcatggggttgtaattaaaggcctattatcataagaaatcttcttttctaaggacattacaataagttggtcatgacactgccatatcattatctatgctataaatacttgaaaagtatgcacaacctttgtactgttacaaaatattgaggcttctagccaatgttatcagcatatttaatccatcgtcacttcttttccatacatcgttgtacataaacacatcatagaaataatattatagagcttgtgtccctatttcatattggtgacattgattcatggtgtgagaggtcctatttgtatatataagtgtttcatagaaaacataatcaaataggccttactcatgaatcatgatagtcgtgtttaagtaaaggtgcattatgtgtctgataaccaaaaaagtacacaagccaacaaatctatgacatgtcattgttgccatgttctaattatgaaagaaggaagtaaaaatgacatagcaaacacaaccattgtcatcatgaattgactgccaaagtttataactaccctttacataacactgtttttttttgttatgttttgcttgtaataacctcttcattttcaaaagaataaatttcacaaaactataagtattttgtacaatttatcacgaactacagatttaagagcttgtttcacaaaactacagatgtaagaacttgtttcataaacttatagatttagtgtattcgtttatcaccgaactacacatttagtgtcttaatttatcacaaaactataggttttatgtctccattataaaacctatagctttgtgataatggagacaataaacctgcaattttgtgataaatgaagatattaaatttgtagttttgtgaaacaagttcttaaatatgtagttttgtgatatatgtgcaaagtacaagtagttttgtgataaacaaagacactgaatctgtagttttgtgaaacaagttcttataaatttgtagttttgtaatagatcgtataaagtatttgtagttttacaaaatttactcttttcaaaaatatattcttgcagtataggattcccgcatggttcaccaaccaaaagaccaaaggagaggtgtatgagggattgaggggagcattatgcaaatacactagtaagtgataattccataaaaaagctagaggttacttccaagcacactaaggccctgtttgtttcagcttaagattattgtaatctagatttatagaattagattactataagctggattataataagccgacatagaataagctactagctgtttgtttctctggattattatctgtttgttagttgttagtcacccaataatctaaaataagcacctttagagtggcttaccagattatagtaatctggcttatagattataataatctatcataataagctatttgtttatttcagcttactcataataatccagattataataattctaagctgaatcaaacagggcctaagtctctgaagattgttgttatgaaggtagggcttggcacgatgagtcgatgactagaaatagtagtggatgagctcaatatggttggacgacaagagaagagaactataggacggtgagaaggaggaatgaagaaaatggaaagggacaagaaggccacaatggtatatatcaaacacaatactatgttttaatatgttatttttacaattcagtttgtagattcttagtgcccttatttaaagagttaatttttagagtactataaattattttttcccttatctttgcttaccagtcttgacaaactaagttaaaataagaagtaaacataacacagaaatagggggaaaacgtatgtctagataagatccactttcacttcacccataaaaagggggaaatcaaattgcttagcattaccaataaaagcaatgtaatcataactattcaactcgatcaaccaaattgtccaaacacaaccaaaatggatacacatgaggactccggcttgcaaccgatgatgcaatcttagactaattaataatagcttttcgacacctaaaatccatacagagaattggtaacaattacatggaattcctaattacatatggtttctccccaaatcaattgagtgcatcagtgcaataggtagacaactcctataaccaccacaaatatatgcataatcttttaaaagttatctttttttttgtttgtgccccttttgaaacccaagcatcagtcacttcaattcaccaagttgatcttgagctatttctcaacagattcataggactatcgaccaaagaggaagtgttcctttgaaggagattggaggaggtggtgaccctagtatctattgcgtatgaattgtccgctatgtttagggaagccattgatgaccggtgaggatcgtagggtttaaggtggctactagtgaaaaggaggatgagaggaatatacaaaagtgaggagggagaggaagaagatgggcgatgacaagaaggttatagtagtatatcgactttgcttcttcttttttttttcagtttctagattttgagcaacattctttaaagtgacattttttatagtggcataaataaaaacattctctatctaccaatctttattcattcagttaatataaaaaataatattgaaaacaaggaagaacaactatctagataatacccactttcacttcaccaaccattaacaataataaaaaaaataaacatacaatatattatctacacagcaatatcatactaatttaatttgattagttaaatcgtaataagagaaaaataggcacaacacatacacaaccaccctgactctaagataaagttcatctagaagactaccggtagtaataacgcgtgagttttctattccaatgaaaaaaaaaggagaaggaaaaaccgtatctaactaagtatagccaccgtggtagccaagagcccccccacgacttaatcctataaaacccccgcgataataatccgcaacctagctccccccaccccctccctttttctctcttttctttttgttgttttctctctcgctcgctctcgcgttgcgcctgcgccccttccaccccgcagccgccggccgcttccaattcgactcctccccctcgccgccgcggaagccgccgggccgcgcgccgccgccgattccccggcggattcgagagactcgtccgccgatcagaggagaggagaggaggcacccgcctccaggagtagaggaggaggaggaggcggcgtgaatttgttttttttttcttttttggtgtgtgtgggtgtgtgaattgcggttcgtgtggttcgtgtctagtgggtgaggcaccccccctagggtttgagggcggcctcgctagggtttgggcccccccgcgcgaggggagggaggaggaggctgccctagcggaggaggaggtggaggtcgccccctggtgttgtggggaggaggaggcggctgaggcggaggtcggtgtggtgtggttgtggtgtcgcattgcggaggacgattgattgtgctggtgggcgctgattggatcggagggaggaggaggagccatccctctctccccgccgttgctaggtgggtagatggtgagaggcgccggctgccatggagcaggacttaccggcgctcaagccgcaatggctggtgcagggccaggtcaccaccacgggagccgccaacctctggaccgtagcttcgccccgcccaggcccaggtgagctccactggccttgccaattttgtgtttttttttcttttcctttgttgcacttgtgattgctagtatgctataaatgtgatatatatccccttttgggaattgctatgtgttatatactgtatagtggcatcaggatatcggtgtgaaaccggtgatagttgttgattcattccatagcaatcagacatgagtttagggttttttggtggttctgtattgagatgttcatgggagcaatcttctcttaatgtactctctaactcgtagttttggttgatatgattgaatttgttatgtagtttcataattgattattaggtgactgatatggaaaagttaagagtaatcaggtagatttcatctgtatctttttacaaccaatgtgtcctgtatcacgaaataatgcttattgtttgagtgctataaggtgtttctaggcacatgctctgttggtgtcactgaaatgtaacaaagcttaagatactactctcttcaaataactgtaaacatatagtgatattgttgaaaatcttatcatgcttgccacaacttatctacaagagagacatactttagttatatgcacaccaagcaagtgattactactcaatttatgacatgtttgcctctattaattatatacatgtcaatgtaataatatcaccgataacatttaacaaagttcatttggtgggcctagaaaaactgaagtgataagtatttgtaatctttataaaatgacatgacattttattttgaccatatggaatagagtacagagaagtttctttggctgtatcagttgatttattgtagtgcttagtttttttcccgataacaaacaccatgctttgcattgaggatgtttgtagagtacagagaagtttctttggctgtatcagttgatttattgtagtgcttagttttttcccgataacaaacaccatgctttgcattgaggatgtttgtgatgtttagtttccactgatatcactggatttatggtagtgcttagttttttttcctgataacaaacaccatgcttcgcattgaggatgtttatgctatttagtttccagtgatatcactggatttatggtagtgcttagttttttcacgataacagaaaccatgcttcgcattgaggatgtttatgctgtttagttcatagggatgtttatgttgtttagttttcagtgctatcattgtagggcttcgcattgaggatgcttatgctgtttagtttttagtgatatcattgtccgtcaagtctaagacacttatttccgaatttggtaaactatatatgatcatttacattggtaacaaatattttcttggcattttcagataaccaaggtaggggtggttcatcaaggaaccattcatcatctggccaccaccgtgaccagaattctaggacatcttcgtcacggatttcctcaaatgggccccgtaaacatgaccgggaccgggatggtatgggaaagtcgaggggttatgcaagttttggtagaaacagggaaagggagcgagagaaagaatttgactcccgtgacagagagagtaggtccattacagcagacggttttgggtcgtttagtacatgtagaccggaaagggatagattgaatcgttcccgctcgaggacagattcatggaataaaggtgtagttagtccaaataattgtaatacctctagaaacaatactggtactggtggctcctttgaacgagaatttccacagctgccttttgatgacaagaggcaagatatcaacagagtaccatctcctgcctctccaattcagagaactgttgcaccggatcgttggaattcactgctagcggatgtccctggctcaagtgagccaaagaaaaacctgggtgtatcttctgtattacgaccggctcctagtaaacagcctgaggcagcgccgaacagcgggatctcattgagcatggcggagactgtgatgcaagttcctttgtcagttgggcctcaggtattgcacataatgagttttttgatacattttgcgattatctcttggctttctggattcatgtgcatattcttctcctaacagttatcgatggaagcccaaaagatggaagaaatcagtttaagacagaacactctaaggcctatgacatctccagcaatcaaatcttcagtaagttatatttttccttgacatcaaaataatgattcacatttagtaggtgtctattgtctgccatcatttgtgattaacttttggtctttggcgagagtctaattgatttccattaaatgttggcacttctatttgccaaatactttagtgatcccataaatgaacttataaagagtttttattgttgggatggatatttcctatcaccattgttgcacagaaaacatttttcattgttcatggtgtaattaccatttggaaatatcctagacggtttacaataccatgagtgagatagagactatcatgccccctggtatataggtgttaaaactactcaacatgatatataaaagctgcaactatcagttcctagtaatccctaattctatggatgctctgctgttattcccagttcagtggttcgatcttatccacaaccaccttatttgctagcagtgagtccccaccccacccccccaccccccccccccccaaaaaaaaaagtgttttgtgttaagctgctgcttctagttatgttttgtttcaccacaacttctgcagcactgggtgttctgattaagtaattcatttcattattcaggtaacaaattcttcaaaaacaaaaggtgtgagaaatggagatccttctggtcccatcaaggcacatcaatcattaataccgtccacaaatggctctgctcgagctccagttaaaactgatctttcaaaggtatctcacgcaggaaatctaaaaatcctcacccgagagcaaaactgtactatacacactgccaaagactgtcctgacaatcctatgagtcctcctccagctcctgttgcttcagtggaaccactgaaaaagccatgtgttagccaaaagcttaaggttgccacccatgacattcctctctctatactgcaaagtgcttatgtagataaaaaattaaatgcaagagataagcatagattctttgagtcgttgaggatcaagtcttcaaatggttcaagctcaactgctgagtcaggttgtccatcaccatccagtgtagctgatgtgaaacaagattcttgtcttaatgttggaaaagatgtatccttgtatcattctggaaaagatatatccttatatcattctggaacaaaatgtatgggaaatggaaagtgttcctgtgaagaagcaaattcttctgatggatctcagaggcatctgtctgataatgagaacaattcatccttggatcacactgcagatggggtttctcagaatcttctagtagaaagcaggtccatctcatcatctgaaccttctgataggggagatgaattccgggtgttcctatcaaacaataccgaaggcagttcatcatcagcacctgctgattcagatgatgggtacaagagatcccagtctggcagtgaggaagctagttcatcctcagagactaccgaaccaggagatgaggagcatccagctgaggatagtcttcctgctgattttgtggctttcatgatatctctcggctgggaaaaagacaaaaaggtggaacctttgggactggaagagattgctgtcactgtaagtttccatttgcatcctagtttctcattggtctatctttgttttccttaaacaaaaaataattgttcaacatgcccacttcaccaaagttagaatctgatagtgtttcagtaatctttatttacttagaaacttctgctatcattttgttgtgacacttgttctaatctttcaggtgagggctaatgaggagctagagcagaaacttttgtccatggaagacaatgccaacatcaagatcgttctcctgtatatctattcgggcagagggctggataaggagctgatgaagcctaacgcaggggataaaaacaatgcttgaagaacgcaggtgctagggagtaaggccacagtagctatctgcaaaaaaatgcattgccaatcacacatcagtgagcaattgggcgttggttttgtttggatgctgagaagacaggtagcaaagggagtcttggcctgaattttgtcttagattaacaagtcaagattattttttttcctctattgacgcttgtccagcaatttggggaggtgggggttcactggtagctctgacaattttttgcttgataaaacagaggaagtttaggatttgtcgtctttttcccaggaataccaaaatgtaagtccggttattggaggcgcatggctgtgctgtcctttaaaaagaataggttcaagttttcccccttctcagggcttatctttgttttggaaaaagataagatgggtttttaacatgaggaaaggtgaatagttatattggtctcaaaaggtctgtctccttttgtgtctctcgttcgtttactgtggtgtgtttagttgttgtttctcggtgttcccttcataagataatcttcagggagatgcattctgagcgtgcatgatagtaacatctaatgatcttgctttgatccagcagttctcaattactaatgatcttgctttgatccagcagttctcaatgggcagacatttgctgatcatccttttacaaggaatcaaggattataatgcagggatttcgtatgagacaatttgatccttgcagcgcgttcgaaaactctgttgttaaaccagggactgagagggtcctccactagggatggtaattgtgaccgtttgcccgtttacttgtggttaaaaactttattagggttgggtttgttctctattttatacccatgagtatcttattgggtcaaaagctatgcccgatagttaaatgggtatgggtataggtaatcactacccatgcccgtttacccgtgaagtctaacttacatgtaggcgaggagcaaaatccactagaatacataagctacgttctttgttttctacggtttcccttttatttttcttattatttctcttctccttactctatcgccgccaaaggagagacaccacaccgagacggagaatatttgatgttttaagttcaattcgaacttagaagcttgtagacttgttccactgcttttgttgtgtcgggtaaacgggcacgcccgcgggcacaagacactcgcgggcaatgggcatgggcaaacatccttacctgtcatgtagtaatgggtatacccacgggcacaaataatctcatggacacgggtatgggtaggcactacccgtgcccgtcgcgcccgattgccatccctatcctccactgctcactgacacatggcccacatgtcaaatgacctgcacgaaattgagtgaatgatgctacgtcattagcaggaacaaacggtgactattgattgtcgcaccatggccagcagccaactccatattctggcagggattaattcactaaaaaaatgaaaatactctagaaaaaactacaaaaagaattgatcaaaatttgcatgaaacaacgttttctacatatcacttcgattttttctactttggtacacggcacctgagaaacaactcccccctacatctaaatgcaagccactccggtctctccttccctcttcgcatcaccaagtcaccaatggtgacaccaaaaaatagccacatctaccgaatactctgaacaagtaacatttcaccatttcagttcaagctagcacttgtgtagttgcgtagccgtgttgccatctcgtcaatccaaaccaccagaaatgagtcgagtccatcagctaaggtgagtgagaccataatatgccctgtttccaacatttccagattgtcgctggagcaagatctctccatcaatcatcagcctcgttgagcctacgagggagcattcgcctgtgcaaaggtcaccatgcgagcctaccctgtatgttaaatatttacggggcagcgggtttctttcttcgctagattagagcactccaaacagcagaatctccttcaccgcatcgagcatgtacttccttgatcctctcgaccgacttgcatatgccgctgcagctccaatcgaaagacgccacacagacattgccagcttgtcctttccactcgcaatctgcggagttgttattcaaaatttagagggaagggatgaaaaaatggaagcgtgtacgagaagcattggtcaagatcgaggaaacgcacctggtggagtcccgcagcacatgtttctttcatcgatatgattcacttctaaaccaataaaccatgaaccaagtgatacatcttcgttcgcaaatttgtgtaagataggcctgacaaaacatcattggaaacattagtattttttcggtcataaggattttgcatggcatggcataggaaacatactggttgattgaaatgtaggtcgcgaggtcttttgaaatcgcgtatatctgcccagtagcatgacggaagtatttgttcccttcctccccaaatttccagtactcaggttcatggtacttcacattcctgtatgaaaggagccagttcaagcagacatttacttcaagctacaagtcaaatttaaatttcaagataggggagttaacgttacttgtcagcgagaactgggcctgacttcatgcatccaatatacgttcttggttttgatttatgccgagcaagggtagtggcaagcattcctgttatgttgtcacatgaagtgggttattatagatttcaacataaggccaatcggcacgtgaaaaaaaaaatatacccacctaagttcacatgcacatcatcatcaaccttcacataaaagtcagcatcccaaataccaactgctgtagagaagaaaatctttgtcttagctgagagttcatgatacccttctacatggtcctggttgaacaaatgaacacatggtaaaatgtcagtgctggttcaaggaaagcatgttcaaagctttgaaaggcaggaaagcattacttactagtctaagaaagtcacgatgctgagcatcctctgaatctatagctttgtccaatatactgttggatgtagcactgcacagccatcgaagcagttagtatttatacgaaatttaaaaagtatttcaagtttcgatatacacatatatgggaacatatgaaaacacgtgttctgcggtgatttatagaacaaggcagtatattaattctggttttatcattgaagtcagctatgcacaaccaaaagccctttcagattggcacaactgattattacaaaacagaggaagcaaaaatggatttataaagttctacataaacaaattatccactagatttcagtgcattctcaaaaatcttaggaacttggtgtattctgcacacaaactagctcttagcaagcacaaggatggaatccaaatgtccttgatgacaaagatacttaagaactacatatttttgcaacatgaggtatgttataatgttgtccactataccagttcccagttctgacatttcaggaggttatttgcatgctatttttgcaggcatatttttgcatgttatggtaataaaggtatagtggaagaagttgctatctaacataaaagagaaccgaatgtccaaatgtatgattgaaaccacatgcaaagataaaaaggacaagtgattactgattaaactgtaaaacgcactaggagtacaagaaccctctgtttacctatgccctatagtgaagcggataacaattcccttttgatcttctagttgctgcagctttgcacctaagaacaagaagttctagttaaaaaatgacgacaatgatagcttatggaatccaacaatggaagggctaacaattagcatggtgatgatatcataaatatttccaaaattactagcagaactatatgaacagaatgatcatatgcattatacatatttcctagaaagatggaccccagaaggaattttaagtgctgactcctataagagtatgcaagataccaccagcatctatcacattcgacttatgacttatctatggaagatggcgtcaacgtaaatggcaaagactaaggtcaatcttctagactaattgcatgctcgtacagattaagctaagctagtccaagtagaactatgaattgcttcctacttaataaactaattcgtagtaagtcaaaatatgttatttaaatttaaactgtcagataaaatagagagcttagaattcagtgtcatgtgccacatgacgtgcatgtgatgaaaaactagttccaacaaatatcgttatagcagcaaccattgggccactaggaactaaataatcaagctaagagccttggagatgatgatgattaaaaatgaaatgtctaacaataatagaaccgtcttgctagttcatccataaagttataatacaagaaatagcaaccttgaggcatccatgtctctcgcactgaatcacggcgcttgcggctgctgaatgcggtgtttactccaattacaacaaatgccttcttccttggttggctagtttctgaggttactggtgagccaccagcacggagaagttccagcgtgctacgcttagctgcaagttccatctgcagcgtggagatggacttatccaacaatctaacgccacaaaacaaatccaaaggagagaatcctttcagaaacaaatattcaagcaactcgtaaccataaagtgaactccaactagggtcaagtgagctcactgtatggcttcgtgggtcttggttacctcacccattatgtccttgtcttctccatgcttctgcaaatccaattgaagaagcatatggcagattacatgagatcaatggcaaaaagactagaaccatgtgaatctatttaaatttggagcccaccctctttgtattgcaatcctctgatatgagttgcaactccctatcctgcctccggcgttgagacatgatgtggttactggtatcaggtgccgtccaaaaactgtaaaaccacccaaaagaaatcgtcagggagatgaaagagcaaccaagaaaagataatctgatcatcaaaatgcatgaattcaaaaataaaaaggatcaggaaccataataacccgtgtcattgcctttccgttatttgattaatttcactatttcacagcctcgatatttgaaatgagcaactgaacctatgaactatgataccaaatcccagctagttcgtatgccaagttccagtctaaatggaatatactgaactactgaagacaattccatcaagaaaagtataacttgaacttgttgcaaaaatatatttcctccttaaaaaggttgaaaagctaaatccgaccataacactcaatgacaataatgcagttgttccgaatccaaagctatcataaatgaaaataagcccacacacagcattactactgtctagtgtctacatcaagtacgaatccacacaggaaggccaccacttcattgggagaagcaaaacatcctcaaaatgcaagcttttgatagatctcatacaggtattaggtgaaaagaagctcacctaacacaagcaaaaattccaatccttcttcgatttctaaccaaaattagctcacccaaaacagcaaaaatcccatccttcttccattattaaaccagattacactctactaaatgcagcatttttttcccttttcctttaacatgaaaatagcaaagtttttttttgggtagaaactaatgcggaaacagtgagctaagcatcacctaaccacacacgcacgagcagatacagcagaagagaacacctgcaccagtccacatcgaaacgcgatctcccgttcttaaaaaaaaaaaggcgatcttttcaccaactccagaatcccagatcgccatgaactccggaagaggagaaaaacaaatcttggcacgccaagtttttttcaagcagcccgaaacgccattggctatgattagaaagcttttcttttcaaactccaaatctcaaacgggtcgatctcaaaaaaaaagaaggattaatctcagattggtcaaagaccaggggagaatctaccaatgaccacccagagaccactttttttacccgaccaccgtaacaaggaaaccgcacggcgagatccgccgccgccaccggcgagagaggggaactgggagagggagagagacgcaccgatccgtgaagagcatgccgaggccgaagcagaatgcgcagagcagcagcatcctccaccgcgcggaggaccgcctgtccaccgcgccgcccttccccttcatcatcatcgccgccagccgagctccagcgccccccccccccccccccgggatcttggccgcctccaaatcgtcggaaccaaaaaaaaaaaaaaaccctgaccaccaacaagacgaagaacaagaagctccccccgttggcgcggcaaggcccaaacccgcgaggagatagagaagaagaacagggaggggtcagagattggcggtgagccgaccggagaagaggaagaggagagatgaggaggaggaggaagcagctgctggttttgctttggtttgcttggcttcgccgtctcaaacaaacgaaactatggagcgcgtgatggcctcctccttgtttttgcctttcctttttcctcacagcttttaaaaattattattcactattaacatttcagtttccttttcctctctttcttttctttttcttttgtttttgtctttctccttttgagctgtgctgctggtaagtacagtatatttcttctgttttccaactctgtttcttcctcccttttttttcttcaaaaatctcttccctcgaattcagtgggtgggtccatcatctagcaacccgggctcgtcgatcaatatgtaatactccctccgtttcacaatgtaagtcattctagcattttccatattcatatagttgttaatgaatctagatatataaatacgtctagattcattaacaactacatgaatgtgggaaatgctagaatgacttatattgtgaaacggagaaagtagtattttaatattgatataaaaatcgaaaatattatctaaaaaataagaactaaaaatagaattgtcgatttgtccggcctttaaaaaaattttcttggctttgcagctactttaattgtggcatgaaaaattcttcatttgaagtataaaagggagtatattaagaatgaatatacaaatgaagcaacattgcaatggttgtagaattaatacaaaatgtactttggtgtgctttggttggatacaaacccattagttgtttaatcatgtgatgttacgctgggctaaattattactattagccagagaggacgggagtacctgctgcttggttggattacctgggacagtgtgttgagttaggtcaccaatgcctctcttggatgtgaccacatgagctaattttgggtctccacatgttacaaaaccacattttgaaatttgaacagatgaccaaacataagaaaattcagtacaaacaagtaaaaaaaatatacagccaatttgatatgctggcattcagaattaaaatggataaacttaataactaggagtagtagcaaaaggggaataaaagaataatccaattagatgtgctggcgacattggagctagccaacacggttgggaatttcttttgccagtcaagccggagattcgatagtcaagacgcaagcaccactctgattaattaggaaacaatggttaagagaatcattagtgcatgctagttgttaggcaggaagaagaaccatggtccaaaagtccaaaccgccagcttagctcagctcagttacgtgcattcgtgcggcaacaccaacgtgccatgcacgatgagttggctggtagtgacattttacgcaattccgatggttggctggaaactcgtcgatacattgtatgacatgaaagcatatgtaatatttttttataagcacagcacaacatagaaacgcagacccccactatacgggtacactcatccctataacacacatatataatactaatatgttttcttaataaatgatatggttaactttctgatatgtttaatcacccgtcttacttaaaaaacttttatgaatgctgtttgttttgttgtgatttgttttaccataagaaaactttaatcctaacttgtatttacactatttttttcataacacaaatgattaagtaaaaaagttaatagtgccgtatgttagaaaaacggatacaagtaaactacgaatgcatagatgtacaataatcttcttctagaacgaacttactttcatgtcgggacaccggccaacattttttttttctttgagatctggttctgcattatttcgatccagttgctggttctttcccccctcctattaaaatatacaacggattctattttgcttgcgaacacaatggattatacacattaaaaaaaacttaatttatttatgtgaacatgtaaatgatgacttgtttggcatatgctttacatagcttgtggccagtccaacttatggcctaagccaaaaaagaaaaagaaaatctccccttggttaattaagcttcactgctaaacaaacctatctgaggtggtgtgtcaagcattgacaaagatttgtcatttgtggatgttgatgcatgagcttgtgatcacaaatcacaattagacgccggtggacaacccattttcttgcagtggttgcctggcagctcgtttctgaaccagccaatcatttcacaaagccaataagctttgagccgggcctatataattatgattagattctgcaccaaagattctacatgcatggaccacaatcgcatacatatatgatttgatgtcatatatataccagtactttattatgtagggagatgatttgcaagcttaacattgaccatgttaggtagtagaaacattctatctaaaatggatactagaaggtcaggttaggtagaaatgtttggtaagtttcaacttgcaaaactgaatgttctttttggaagtaattgggctatggcatgtgactttgtgacactagaggtttcagactgttcaagtggcatactggagctgcttctctcacttttgacattgtttggtagtgacatactaatcatacccatgatctaggaactatttttcccccaacccaacagagtacaccctctgtaggctatgtccaatagacaattcatgtataaaagtgaacttaatttgagacagagaatatagtaacttggaaatggcgacatgaattttttttttgttcaaacagcccccctaagtagtactacagtaatgtcaacaaccaaatcccaattgaaaatgattgataactgataagcacaggagtggcatggctaatactttgccagaaaaccatgccttgttacaccctatcgtcttctgcatcagaggtttggttggaccaatacatcaagtgaagtcttcagaaaagggacttctttagcttagaaaagccccctgcaaatcaacaccaactcatgaactgttaattagaatccacgaatatactcaggacgtgtattgtaaggcaaagaaaattcccactgttctacaaagatgtgtatctgtcagtggcctactggtcaagctcaagcaggataacttcagacaagtctatgcatacatctccgtggaacatgtggaatgcaattgtgtaaagcaggttgtaaagttattatcagttgctagtagacttaatttaggtaggaaacgtatctaggactcaaggaagtattttctgcatgcaactacctggacttggtttttctaaaaataaagaggattatggatagcttacagatgcagtatactgaccagtctagcatttaggttggacataagcagatgatgtgatacaagagcttacttgtcatacctcacccaatcttcgaagtgaatacatgtccccagaaatatgaattattgattccacataactatttctttctgattgaatcatatttcgcattcttatcgtttaagtatcagatatttcgtattcacttagggatgacatctgaaacggttatccgcgataaaaaaagacatctgaaatggttaacatttaataataaactagctaaatgcccttgctttgctacggataaaaggaaaagaatatcataatactgcattaaataaataaaacattttttcatgattacgttacccacctttttgctacaaggaatactcacctcaatttaattttatgtggctatctatgtagatctagttgttatgtaatattaagaagttcaagggataatgtataaaaccacaatgggaataggtgatgtaatctgccaccaccattagaatctttttaaaggagtatagaaaaccatatgtgcaacaagtaaacttcatgtaaaattggttagcgcaaaaagatatagatccatatatgctatttatattcataaaggtctgtttactccaaagtaacacagtgaaactaacttgagctgcttgttatgcaattatatttacagagttactaaactatgagcagaactgtatagtgcgacacaaaatttcacatatcccgtaacaaggttatttccgaatcgcctttacattcctcgtctatcttggcatacttgttaaatcaatcttcagaatgacaagtccagtacatcaacccactgcaaggcataaatatcaccaacaccataaaaaccagaaaaataagggtgtgagggaaaatgtaacacaaagaaaggtagagctaataccttataagcacaaacacagactgtaggacgccagcaacaccagtccatgcagatggacctgtatctgtaagtgcgtcttggaccaaaaaaccaacagccccagccaaggaaacaaaagacaccacgtatgaaacaaaaagccagagtttcaacctgcaatttaaatgtaatcattgtcatacagtggataatgaatgacagacagatggaattgtattaatatggaaaagttaccactttacaagggagtaatagtagacagacacaagtacacaacagatcagacaggtttttagatatcatcatgactcgacatactggtttatgcatggccgtcttggcttgtcagaggtttgaataacagaatcatcttttaaaacaccagcatgcagaaaaccaaatcgaacattcgataagttgcgggtagtaataatgaactaacgactaatatgatgtgccattctgttcttagtttgtgtggcacaactgttgtcagtataatgtagatgtatccctcagaagagtaacagatcgaagatgaatgaatgattcactcttattccatggtaatctcgttcactcattgacaacgaaaaatcatgcttcatatatttctctgagaaagtaaatcacagtttacagagccatataccgtttccattgtctcgtatcattgccattctagcatctattcctttatatcccaaaactaaattaaagaaatatggctctcttctccacgcatagaatacaaaatgagcactactgtgttcctaatcacatttcgcaagtgtaaacacgcattcttcagaaagcaccaaaaactaacagctctgagttgcaccaatggatgcatgcgcgtagcactaaatcacaactggcaaggttaagcattattaatcttcccaaatcaagctcccagaccagtaaataatctaaccataagcagcgatagcactgatacccatgaatcagtaaatcatgactgaagtttccaacactcctgcaaaaccagaggcaggattgcagaaaccctcgcaaactaaacacaaaacccacctaaaaaaaggagcgaaaaacaaagaaaaaaaacttaaaattatcccctcacctccactcggagtcgtcgtagggcgagtagtaattgtagttggcgtcttccctcttcacgcagttgaacatgagcgcggcgaacgaagcaaataaccctaaaaaagaaaagaaccaaacccccaacaccctcgatcggttaggttaaaggcttcaatctttcgatctttgggggattagggcgagagaggaagaaggtggtgttaccggggaggtagtgaaggaacgggacggcggcggcgctgcagacgacggcgtcgacccagaaccaccagccgaccccgaatacggcgccggcgacgcccggccccaccaccgcccacaccgccgggaagctggtggtatccatcgccgccgccgggaagaggaacggagaaagttgagagcttttttttcagtgtggtccttgcaaagctgctgcttttagccctcctgctgcgggtgtatacattttcttttaatcgcaaaaagaaaatacattttcttttacgcattggtccttccagtttgtaaaatttgatgtagtggcaccggttagacaatgccatctttacagaaatttcacggtaaatatgtatggagtttctgcaattcaagcacgggcaaagctgctaaattcacatatcaacgcggcgcaatcaagaacccgccaatttgcactgacataagcagcggtaaaccaattggttcgcctgaccagccgctactctcgggagtttgttaagaacacatatataaaaaaagttttacttataaattaatttttattttctaatgaactttttttcttattaaaaatatgagcaaccgatgaggacctgaatgtccggaaggcagtctgagccaaaataattttctgaaagcctttcttccatttgccaaggacagagcacgacggatcgtcattgcttcatctatgtcagacgtcgcaactcgcaatccctgggatcagctcgttgaaagcaaaaacacatgagccattgttgtctcagatcaggacacccactcccattggacgtgaagagtggaaaagtgcagcatctgcgtttatgaacattgttccagtctgtgctggaatccatcctaaaactgaagtagagtcgtcacactagagacattcacaggtttggagcagtactgtacaatgatctccacatacaccaaaatgaatagaaaatccacgtatgaatagaagcattgttgttcctggcatcatttcttgcctcccaaatgtgccaaaaggtcgcagcaagagcagtattctgaatgttggatccacgcatcaggaagtcaaaaatctactgtctcatgtttgtgatgtttctcctgcacaagttggggtcaaacttttgtctaattgcctcccacactgcatcagcaaacgggcagaacaaaaatgcatgtttgatcctatcatctctgttgcaaaagatacgcatctatccatagctggaatatgttgtctgaaatagctggtttagtccaattcacttcatgaatcatacaaattcagtcaagatttcattttccttgtaattttggacccaaaactcaaaattcagggtccagactccagacctgaatgcatactagcaggaaccaagtttgagaattaacaagcaataagcaaatttcacactctattgcaggaaatacagatttttccaggaaatgctagaatataagcagctacacagatactgttgaaattcatgaaagggccaacaaacagctccttcagtctcatgaacactgacaatagttgccctgatctatgtgatcaaatacaagagttaacacgatcacggcactatttgccacttggttttgatttcgatgagtgactatcctcggaggggcgtgagcgctggagttcctcaactattgccgtgaccgcacgatcgcccctcactaagaggcgctccagcaactctaccttctgcagcagctgctcagcatcaatactcgcacagctcaccagcttatctgcggtcttcagagccgtgcacagctggtggtagaaacaatgatgaagcaacatcgtcagcttaaatggctggagtaggcaattacagtgaacggcatacaaaaggagatcaagatacacaccttcagcatcaatgaaggccatgaagggtcattttcttgcagcgctttcatcaaattgtcatagtgctcctgataagatgatgaacaggtgcaaattttagttatgaacagatgatgaacatctgcaaactaatgccgtttataacctgaagatcattcatctgtactatagatttaatttgaattttacagcaaacacggtcaatttgaagcacatctgaaccaaaaaaaattcagttcgtggcctggcaaaataaataaataaattcagttcgtccaacatctgatctgctccacaagattggcaaagtcgccaagcaaaattaagcacaaatatgaatccaagtttccaagaaccactctatctaacccttgcatctatcatcatcaacttaagctcgcctgaaagtagagtagactatttcctcaatctcataaactgtatcaggcccattaattcttcacctacttaaccagaaaataccggcacccaacagatagctcaggaaatcgaaccaattgcaggacggacgcatgattagggaactaaatctcatatggtaggatggatcgatcgattggtgccgaccaaatctaggaacggggaggagaggaaagaagaggaagggagccctaaccccgaatagccggttcagctcggatgggtcggcctcctccgcctgctgccccgccgacgacggcgacgacgggacggacacctccccgccggcgaggtcggcgccgccgtcgacggcgaggtcgctgaggaggtcgccgatggtgagcagcgggcccccgactccccgcatctcgccgcgtctccccctcttcccctgtgggcttagctcagtttctagtcatgagtatttgggcctatttaggcccacattagttcatgggcccacactgcaccagcgaattccgggagcagggttgacgtaaacccacatttacgccttcccgtgttatagacgtaatttgaaccatgcgccgtaaaattcatttttccaaatgtctggagttactctgaactgtggaatcagctaagtttttcttttctttattattattattaagggggaaatgtacaccccgtaggaatggtacaattgtgctgtagcacaaaagatgcagcagtgttaactataagtctataactatagcggcatcctctttgtgctgaacaatttaatgatacactggcctatatagaatgccaatttcttcgttgtagtgagatcgctaatactttgagttcagatcatgacacgcaactcaaccctgtgtggaatcatccctcctgtgatggctcctctgatctgcaatgtgaaacggatagcgccatcaaagcaaagtccaaattaattcatgtttactggttttcattatattttttttagataatggactggttttcattatatggtaaatcatgtaaacacactgttagaaagttagcttttacggtgcaggcggaattatcagctccatcgtttgccactttgccctccagcttgtctgccgcaggcgaaattcaaattcatattactagtttgaattttaaatttacagcattagcttttattatttatgatttcttaaagctgtgtgtttctatcttcacgaatccattaatctagatatacgattacattgataacatttgaataaatcattttattctcattttagattaaattttaaaattttaaccactacaattttataggcaaaatttgttatatagcatcgaaagttcacgtttttggttttatagctccgaaagataccggttcactttaatagcacccaaagtttacattgttcccatttttagcacttccgtcaatttttccgtccgtcttgatcgttattgacccaactacgcacacgatatgacgtttctacccctcattgacatgcattctacttgtacttgtgaggggtagaaacgtcatatcgtgtgtgtggctagatcaagacggacgaaaaagatcgagaattgacggaagtgctaaaaatgggaacatggtgaactttgggtgttattaaagtgaaccggtatctttcggtgctataaaaccaaaaacgtgaacttttgatgctatataaccaatttttccaattttatattatgtgaatagccaatacagccctgaagtttcgcttcgggctcagtttagtcctcgatgtttcaagtcgtccaaacaagtcctccaaattaaccatttgggttaatatagtccttggaccaaaaaaatgccacctgagtataccaagtcatcctcgcatgcagcggtatgaatgaaatgatcatattctaccccatatataccatatagaaaagaaaaaaaagacaaacagaaaaaataacaggccagcccaagcccagcattgttgcggatggatggccaacaaaggaatttatacgatcagtgcttggctacagcaatcgtaagtgacaattctaaaacgatcatacacgtgtgaaccattcatcttctttttttatttcttttctatatagtatataagggtagaatgatcatttcattcataccactgcatgcgatgatgacttaggctatattcgtaacgtagggttgggaacccatctcctccgcacggaaaacagagcaatccattagcgcgtgattaattaagtattagttttttttcaaaaatgaattaatttgattttttaaacaactttcgtatagaaactttttacaaaaaaatgcatcgtttagtagtttgaaaagcatgcgtgcggaaaacgagggagattggttgggagcaaggagtgccgaacacagccttagcatactcacgtggcactttttgtgagtccaaggaccatattaacccaaatgattaatttggatgacttgtttggacgatttgaaacctcgaggactaaactgagctcgaagcgaaacttcagagactgtattagctatttacccaatatattatatacaagcgttaaatttgtcgtagatgtaagacctggagctgtgccaaacaaaacctacgttgctaagaacaaatatgtatatataaaaatacttatagagtttttttttggttgctagtaagcgttacggcttatttatgtacatgtatgaagccagacaagaatttactaattaagcagggatcgttgacactgattctaccatttgatggaacaacatttgatggtagctagcttactcagcaggcggcgacgatggagcggtgtacttctggatggcggcgatgatcctctccttgtcccgcgtcgcgaacgcctccagcagcaccccgttcttgtagaaatggaacagcggcaccacctgcgtacatgctcaacggatcaactcacaaaccatttgcgcaatgatcagatcgatccaccacagcaagaactcactcgatcgatcgatcgattgttccagtcagatatgattatttgatcggttaccttgatgcgaagccggtctgccacctctgactgctcgtcgtactcgtcgatgacctgcatgcattcgcatcgtccggtattcagattcagattcagattcagaattttctggctttttgtccaacgaattagccgatcgacaagcttgccacagcaatggcggcgcgggggtgaggggttaatcaggaatggcttaattaactaacgtacgttgtgcttgaggaagacgacggaggagccgtggtcgccggagcccttgcagagcttcatgaagccttgctcgatgtacttgcagctgccgcaggacgggcggaagaagtccaccaccaccagcgcccccgtcgccttggcgcgctccaggacgcgggccagctcctcctccgtcttgaactccgtcacgcactccaccgggcagaactcctcctcctcctcctcgacgaccacgggggggagccccggcagcgacccgttcgtgctcccgccgccgccgtcgctctccgtggacgacgcggaggaggaggaggaggagaggtggcggtggcggcggaggggaggaggaggtctcgggaaggtggtggtcggcggcgggagggagcggcggccggaggaggaggaagtcgcggggagggggaggagggaggcggtgatcatggctgcattgtggccgtgaattgtcgtgctaaggatattgcttttgattttttttttcttttgacaaaactttcctcttggtgttttttgtgtactgcgctgctactgtgggtgaccgaggaacagagctgggtgaaagaattgtttccgcagctgggaattggagaaatttgtagccatcgaaaaattttggttcaattaaaatgccatcacttgaggcagtggcggatctagaaattttttttagcctgagcaaacctaacgatagaaaacaaattaataagtaaacacagatacatatagcattttatcatggatagaagtaaattggactattagctaatgactaagtatgataattagtgctaatctaatggtgcatgtatgtagataggctaatggctaagcaccatagttagttttaatgtatggatgcatgcatgcggcggagcgggcgcctgcccgtgctggccgggccttggctccgccgctaacttgagggcttgataaaatgtcactctcgatcaaggtgtattagtcgaaacgctattctagactattttgtcctttgagctgtttgttcctcctccaacacctatactttctcctttttagtgtcggatcagcttaacaataaccacaatattggcccactacaacaaacacaatatttctgatgtggctaccggcgaaaggcggagttgaaatttataaacagcagcagcgactaggcaagggatggcatcggcctcactcgtgggcacttccacatctgcctcctctatgatgactctgcctccgtcgccgtgctccttcacatcaaccccacccttgtgctctacattgccaattgtaattgacaacaggagagagcggcggtcggaggagggggagggaggcagtgatcatggctgcattgtggccatgaattatcatattatggatatttattttgattttttttctttagataaaaatatttgtatatttttttactactgtgactaagaaacaaaactgcgagaaagaattgttttcacagctaaggaatgggattgagttataggtgtgcttgtttgtttgtagcagacttggctcataagtgttagtgcaatctcaaccggacttcgtgatacaaggtttcctctcaagttaaactatagaggaatacacaaaaatcacctgtttgctaggccgagcccgtggccgatggatttttttttctcttctttctaattttagggaaaaaaataaattgttctcaacatttgtctattacaacttaaccatgctactcccttcgataaatactgatgcttaggattagattaagtaaaacttttgaaattcataccatcaatgatgtctcaaatgctttaagaaaagggtttggtatatcgaaagtattaccataatatcatgaactttattatattttattaacctattctaatatagaattgatggttaaaatttacaagtttgtccaaatcttgtcggaagtgtttgaatatttgcaacaggagggaatacatttattgagtgcatgctacagtgcagccaaggattggttaagggttaaaagtggcaaaaggttaaatgccccccaacaatgatgtgatatcaatatatagataagatttattatgaggtggaggagagttaccgtctatcaatattaccaaaccgtttaatagatagcttaatactactcctatctatgccattgcacgtgttgaccaaatatttgaaatagctattgcgtgaattgtctgtattctatttagatatgacgtaaaaaggctagattatatacttagaacaagtacaatagcaggctataagccagctataaccatatatcaagaagaaaatggaagagagagagaaaaaagcgggttacgaatttatagccagctgcaacacgaactacaagacgttgtgtgtgtatgagaggtgagaccgagtattaatggtgtagtatatttttatatgtaaccattatatgaataagctattagattagctatagatgttttggagctaacatttggctatactgttaaacatcatctacacaaatcacctatagtcaatttaatagccaattcatacaatagttacatataaacatatactacacaattactatttggtcccacctgtcatacacacatgcatcttaaagtctgtgctgcagctggctacaaatctgtaacccgttgctcttctttctcctctcttatctccttgaaatgtgtttataggcttatagtctaccattgtacctgctcttagagcaaggctaataatatagtcgacttggtggctataaggttctttgcagccttttcttagtccaccgatataatagttagctctttataattaatataggacctatttgtctctctcacagagttttttggttcttgtgtcaaagccggcggtaagtttatagcccgcttctcctctctcctctcctccatctcaacatttagttcgtttacaacctactattatacttgctcttatagtggtttaaaccactgttacaagagatagagcattccaagttccaacactagcaaacatcatgcatgggctatcccgcaaatctagtacttatctctggtgtctgcaaatagtatgccttgactgatcttcatgttgtcatgcatagaaccataaaccacacttacatttcccaggcggatcagacttgtatgcaggcatggacaccaaatcaaatgaatataatcaacagtagctacaggtcaggttggagaaacatatctgtctagttagcaagattctgtacattgtatacaggtcaatgagatgtgtcttgctgattaatcacagcagtttgaaggaatctgttccgatgctaattacattggagttaaggaaaggctggacttcaacaggaatgaatatttttcgatcacgaatcaaggtcggccttaaaaaaaaatattgatgtagtcatctagtcctaattaagaatcacaatgccgttgctattcatcagtgctctatacggtcagtaattcacaatttagttgacctcagaatagacatgtcataccagtcttcatggatcatctttcaacatgtagatgccatcatggtcaaaagaatgagagtaaagctgctgggtatgaagctagcagtgtcaaagacaacgagcttctcacttccataaaagctattcaacagaagccacctcctccctgctaattcaattgtcgttctatatcagaactccgagaaagtccatattattgaagaggaggtgccaccaaatacaatggcaagtggtgcaaaatcttcggctcttgtgggggactgggtgtgctgcaaggtcagtagcttcctgataaatctaacaataaatgactattcacttgacccactgtttctagacgaagaatctgtaataagaacatataagaaagttaatttgatgcctcataataagtatataaaacagtgctgcaaattagacctcgtgaacgacgcttcccctccatggcttctttcttttcttgacagccttggcaaaggaatggaccatcccagcgacgcaagttcccaggttgtgatgaatcttcatgtacggatatcccttgacttggttttaactccacttggcaaatggcacatatgaagagcttgaacatatttcgaactgggtattcggaatccaacctgtagtgattagaaaaaactatgtaacaaacatattcaggatgtttgatcagacaggattgcaatagaaagtccagtttcgaattccaaaaatttcaactgttgtactatttgagtgtatattgtagtctggctcaaattgtgtcaatttttactccatttaaccttccttatgatgtacacatctataaactacttcatgtttgatggtacgtgtttgatatttccagccttatgtttatgtcacatgctcctgagaaggtccttcggttgaatttgactgtgttacagcgaaaaatgtatgtcccaatttcaacttctctatataatgttagtgtcttgaactgattccctcacatgaggggcacacttaatgctattgatttgttggtaatattcaatgtaaatatatttataattttattatagtgggttatcaagacagaattagtgaaccaaccgtttggaaagaaatgcgcatccgtcctcaaatatttcctccacaatgtctgggtccatatattctctatctgtatgggatgatgaatcagatggtgttttcttgcgaaacatgtttttgaaaacacccattcctggttgcttttttgtatgtggcatggtaagatttgctttgtctggtagtatgtcaacaacaatacaagtagtgtcatccctaagtcccttttgttgcactgcttcctgaaaggatttcaattgtcagaagagtatcatgtactacttaagaggtaagatcgtggggagggagaattatactttgacaatttgttccgcagcagcctctggaggaagtgttcgtgaacagttaaatgcaacttctgcagtcaagacatcccaaacaccatcacttgaaataataagccggcctccagccgttgatagctacagaaattagaaagcatattaatgtttctcgtaatcaagtgacgaattacatgaataaccttgtcaattcatgtaattgtcaatgtctgagagacaaaatataagccttaaattgtcaataaactttttttaaaaaaggtaataactggcaacctttttaaacaaacaaatgacaatgcatgcagctaaagattaggactgacaaactgatgtgattaaagtaaactataaggagagcatgcagattcacattggtagcataatgcaaatataagctttaagtagcctagttgcaaagaccatagattgtatatatatggaaatagacaattttgacaatagggaagaatttataagagtgtcatgccagatattaagcttgccaagagactcactacttctatgatttacagaagaaatggggttgaggaacataaatatcaaagctgtgaaacttcttttagtactctagtctgctaacaatataacaaacataattggaaatcgccttcagggcatacctttacttgcttgacataaggaaccggaacaatgaattgacccacatcctggtctccaattgaccttgatagacacaaaccaccaggccagcatctaagagggccaatctgggggtagaaaagaaagcaaaaataaaaaaaaatgaagcaagcagaaaaaggaaaggaacacatttaagcagtaaactaacaaagaacaacagtacgcctccttcctacgcttccacctgcatcagtcactatccccatcctttttctcttgaccaacatggcatatcctcccctgctacactgttgatgcaaggctagcatatgcaactatgatgctagaaaaattggctgtcaatgtcaatacagctatacacagcacactatcctgcagaattttactgtagtggtgagcatactactcctgtttgcgaacacttgtcacttttaatgacgcatgcttaactaggagatcatttgtttttatccaattcaactaaattactctcaataaataaattgataaacattgccccccaccaacccccccccccccaaaaaaaaaaaaaaactgcaggtggtgggggaattagcaggggcaaaactgaaatgaatgctttggagagcttggggtgacaagtattcgtgaacaaataaagagatcaaactagatgggtctttgtgattggagtatggacaacacaaatattacacccttccagaaaaaaaagaatcccatgtgatgaacttaagcaaagaaaatggcaatattgaaccacaaaacagggcagggtcacttgagtgacaaaaaaaggataggaaagttcaaacctcagcaccaccaacgacattaagtctaccaacatcacccccagattctgttacacggtcaaccctgcagatcaaaattattaagtaataaaagatagatgattgacatgagaaaatcaagagccgtatatcaggatgaaaaaaaaaaacttactcctctttactggcatcaaatcgatgatcagcagataaatgataaatagaaccttcagcttctagtacacaacgcgaatcaccaacagatgcaacggtaataaacaatccatctattatgacaaatgtcaccgttgtccctgatgagcgggctgcaagaaataaaaacatatagacatatcaggctcagctctgataattggcaaataataacattaaatatgtagttataagaattaaaaaatgaatagtgatggctatccatgtaactccatggtaaaatgtatggtcgtcttttctagcagcatatcaaactttggttggttttagtaacaagatgcattgacaagacactaaattgttcaaaaatgttaccaaaaaggaacaaccgcaagagtcacttaactccagattattactatcattttcgcttatagttagcaaacaaaagattcccttattggttttttgtgtggcgccacacgaaaattgcacctcaacccaccaggctggttatcctcacgcacctttcgtttggaaatctttatcagttttgacaaatgctgcaaccatcgctctcggaagcgcggcaagccaatcctccctgttgagatcagctgggattgcggtcaagatgttgctcaagagattctccttggtgtaaatcgcggctccattcccattgtgcccatcaaacagctgcaacagacagcggttaaggtacttaaagctcaattcatgcatcccataatcacaattactactgacagttagaaatgaacccaaggcaattcttatacaatactgtagtaactaacacggcgtgatcatgtccattgatcaatcgatcatcatcctacgtcaaatcatcacaaatcgtactagtttggatcaacagtaatagactccccgaatcaggcaaattccggcacggcacaccgagagccgaccaaaaaattcctacccaactttccacccgcatttcgccccccacccaacccgatcgcgcatcaccaccgatcggcttacagccggatcgggggggggggggggggggcggcgtcgcggaagacggcgatggatagggaggagagcgcttacgccgaaggcggagaaggaggaggaggggacgccggggaggcgctcgcagtcgggcttgaggaaggtgtagtcctcccccttcttggcctggctgaagagcccgacctgcagctcggggcgctccgccgcggtcttctcgctgaccacctcccgccgcagcagcacggcgagcggcaccgtcgccgcgccgccccccgcgggcaccggcaccgacttggaccgcgtcgacatgcccccccctccctgcgactgccaccgccaccgccgaatccgctcccgttttggcgtggagcgatgcggtggtggtggtggtggtggtgcccctttttttgggggggaggaggaggagagggagaatggtggtggtggaggtgtgagaggagagaagagggagagaggagggaggagatcacatggggggaaggacgcgcaaatccagcccgctacgcgcattagacaattttggggcaaaaagtaggcgagggacgaggattccaccaccccgcctgccggggaagggtttgtttacctttttcattttcgaagtaaggcagtgtttagttccacagctaaaaattttttatacgaagtattaaatataaattaataacaaaacaaattgcatattccacttgtaaactaggagacgaatttattaatcttaattaatccatcattagcaaatgtttactgtagcaccatattattaaatcatgacgtaattaggcttaaaaaattcgtcttgtaatttacatgtaaattgtgcaattggttttttcatccacatttaatgctccatgcatgtgtccaaacatttgatgtgatggaatttttggaagtttaaagggaactaaacacagcctaaaattgttcatcatcggtttatcgaaaaccgataaaaactgacattttttttgtccataccgtgacaaaactagctattgtcgatcggttttcacgaatcgagatcaagcgatttcatgaaaaccgattgatcggttttctaaccctactgtcaggtttttgttttagaaaaagagaagaagttttagtgctcgttccaaggacataaattttggttgcttttcataagaaaacagttcattttttaaaaaaaatatcgtgaaatttatctccgaaccgaatatatcctgagaatatagaaacgtatgctcgcttattatgtgagtggaagaagagtgagtaaagtaggaagttctcaaagaaaaaagtaaagtggagttttttttgccatgcttttatcgaaggtcatatgtacttggaatggatttagaaaaccatcaaaattatacgaccactcgcttatttcaaagcttaatcactattacatgttgacctatatgaagacgatattgtcagggttatggataccacatatctaatagtagttgactaaatctcggcaggacccaccacataccttgtcctatacggaaacaacctgcggatataggaggagttccggataatgaaacacaaccagagttctacatgaaaacgacaagtactactcggattatatccatatcagtttccctagtcctacttggacaaggggacacctatgggtataaatataaggccccctaggaggagaggggacacacgaccaccacaatcaacacccaccacagaagacacggaacaatagatcaagacagaagatcaacatacaagccaacatacgccaagacaagccgctggatatcgacatcagagatacgcatggatcgaccatatccggtacctacagaggccggccgtagggatctagcgctatctttgatttcgtcgggcacgaactcgaggaggaatactaccctgttgtcgactacgagtcagaccttcagaccgccatgtcgacaacagttaaataggctaccccaaggctactccaaatattgtactggtgtgattatggtgaataagagcaatatcggcttcggccaacaggatgtagggttattacctaacaattcaggggcctgaacctgtataaaaatcctcgtctccgtctcttttacctcagcctcgtgtatatcctagtaccaacgatccccatactatgcaaataccggaattgcgacatcaaacgtcgacagatatcataatattgtcgttatcggacaataataacatcatgatcaagttccctcgtctattggtaaaactaagatccttgacttttttggcggtgtgaaccatggttttcataccagttgattggattcgacgagtggctataatttactccctctatcccataatataaggcgtggccaaagttgttacgatctcaaaaactaatctttagcttataatttttcatatgctataaggtttgtagcaacaaaattatagccatataaaagtaaatttaaatctcaatctaatgatgtaagtttgaacaaataaaattcatttcatattatactaggtgttggctaaatattttaaatgttgaatcttaaaatatgtgcacgtcttatattatgggatagtataatgaaatgttttggtaccacactaccacctcttaaaccaaatcatacttaaaattcccctgaaagaaagaagaaagagacaggaaaaaaaaccaatggtgatggctgggtggctgtggctggcctatggacgacggtggcgggaaattttgaatgattttcataagaaaacagctcattttatttaaaaaagaatctcgtggaatttaccctcaaacgaatatagaagaatgagtaaagtaggaagttattaaaaaaaatatagtaggagttttttcgccatgtttttattgaaggtcatatgtgcttggaaaggatttagaaaaccatcaaaaatatatgaccactcgcttatttcaaagctttgagtgtgctactgttaaccactattacatgttgacctatatggagatgatatcataatacggtcgttattatacaataataacatcatgatcaagttccctggtctattggtaaaagtaagatccttgacttttttagcagtgtgaaccattgcgtcatgtctgttggattcaatgagtggctataatttattatgaaacgttttggtaccaccccttagagtaggtacaatagcaggctataagccagctataaacatattttaaggagataaaagagaaaagagaaaaacagcggggctacagatttgtagcccagctgtagcacggactttaagacgtagtgtgtataacaagtgggaccaggtattaatagtgtagtatgtaactattgtacaaattatctattaaattgactatagatgatttgaagcttacgtcgcctgtactattaaactttctcttaaaccaaatcatacttaaaattcccatgaaagaaagatggaagaaataggaaagaaaaccagcggtgatggctggctggcctatggacgatggtggcgggaaattttgttgggcggcaactcggtcacggtggcgggtagaaatagaacgacgcgtactgcctgccaccgccatgtgcccaacggcaagtggcaactctgaccactgacctcacctgaccaggatgggcccaccgcgcatgtgtcatctggactctctcactcaaccgagctcatccatgggccctcgtgggctatgggttacgtgggccagggatatgtcgttgtgggttcttcagtgccctggcccgcgtacagtgtgaccgttagtggtaggaataagttcactttgtgaccctcaaaagtgatcgaaatctaatccgtgaccctgaaccgcaaaaccagatatcttgacccccaactcttaaaaccggtgcaatttgacttcctcggcggttttgaagggcggttttgctgacgtggcgtccacgtggcagtgttgacctgatctcccgctgacgtggcgcataggtggcattagcattgaaaacatacacacgtgggacccattcgtcatccacacaaaaggaaaatttatggggcccacatgtcaatctaacccttcttcctcgttcctctctctctcccttatctctctctcccccttcggcgagcaggtccgatggcggcgggcgggtccggagtggcggcgacggcagtgaagtgggacggctcctcctccagttggctcctcccctcctgtgagccgtcggcaacggagagggagctcggcgagagaaagaggcggcggcgagatggagctcggggggcgtgcttgtgcgcggcgtggaggtcggcctcggccagggtgaggaggggcgagagctcggcgccgtcgcccgctaaagaagaagccgacgcccgtcttagacctcgacccggccactcccgtcgctgaagaagacgcccccgtcttggaccctgacctagccatccccgccgtcgaagtcgacgcctgatggggttggaggaggcgccgaccgctgccgctggggaggaggcgtcacccgctgctactccccgctccatgcgggcgatggcgccgcagctgctactctctcgtcggcgctgaccgaaggggagagagagaaaaagagaaagaagaaagaggaggaggaagaagaaagagagagattggatgacatgtgggccccacatgtcagtgggccccacaatttttttaaatgacatgtgggcttcacaatatttttttgtgtaaatgacatgtgggccccataatttttttaaattctaatacacataagctccacgtcatcgccacttgtaagaaagacagggtcaataccgccacgtaggcgccacgtcagcaaaaccgcccaccaaaaccaccgagggagtcaaattgcaccggttttaagagttgggaggtgaagatatctggttttgcgattcagggtcacggattagatttcgatcacttttgagggtcacaaagtgaacttatttcttagtggtacgagcggctcaggccggagatgggcccggctagcaatgcatggcagttgcccgttagcccgttatcccgtaggtccatgaagagaggagcacggcctcatccatgccagtatgccactctgcttactactactgcttccattgcatgcaaacagtaacaccaagattcctagatcaattgcagtggagtctcttcgtaaaacgcgaaaatatagggtgtaaatcatatatgtagtgcaaacctgaaaattatcgtaggataaaaaattggacgtatgagattcctccacgttatctcgaatatacttttagtaaaacttctactccagattaaatataaagagtgaagtgcatgcgcggtgtttaaacttgtacaaatgtgtcatctagatccctatacactcaaaatacatttttgagtcccgaacttgtcatgagtgtcatgtaggtccaaacgggctccaacctgctctgtgagatgacgtggcatgcgacagtgatgcttacgtgtaaatgggatccacatgtcattcgcataaaaaataaaatttaaaaataaaggagagagaggagagaaaatgatgtttttaattttgaaaaaaataaatgaaaaaagagaggagaaaaaatgttcttatttttttttctatatacgattgacatatgggttctactaacacataggtaccaccatggtatgacacatcagcacacggagtgagttggagcctatttggacctatatgataccctagacactagacaagttaaggagcccaaaaaaatgcattttgtgaatttaaggacctaggtgacacatatgcacaagtttagagaccgctcgtacactttactcaaatctaaaagtaaacatattctactcgaggtggcatggatgaatccgtacgtttatttttgaacctttgcaccacatatttttgctcctaaaacaaacggggctcaaccattgtaaagacaaaatgtgagccggcccgtaagcatgtaaaatgcctttttttagggtaaggatgtaattaaaaagttgtgttagagaaaaaggaattattactattagttcataattaaatatttactgtgtagagcaagattcgattcaactctacggatctcgaccgatagttttataagatgtatcgtttgtgtaaacggatatatatttctacggttttttttataggcattgggagttcatacagtgttttactttttatattttaagataatgaacagaaaaccatcctggcctttgcttaatgagctacggccaattattacaccaaatcattcaaagcgagttatctcaaagtaagcttaaaaccactcccaaatttaaagcgaatacaaagcaataaacgtcaacacaagataaagagtacataattatcagatcctatttgtgaacctcaatccaaagttgacaaaaaaaatgcataacagttatctcaagattacgacacgttgactttagaaatttgttatcttcatcacacttttgtagcagagcccaggaccggaaccaataaattgccctgaaaagaatctgcatataggataaagttgatgactcatcaaaaaccatatcattcatgctcaaacataaagcccaacatacaacagacaaaggaaaatgtacgaattaccccctgaactatagcggtcgaccgaattacctccctaaactcgaaaactagacatcgttcaccctgaatttttaataccggacaaaaaaaacccagggtactattgagagcggtttagggttcgaatagcacatgtggtagtccagtcggcaaatttttttttaaaaaaagctagggctcacttgtcagatcaccacccccctctctcttctcttcctctgaaccgcgcggctgctgcggccagcccgctctcccgcacacactcgccatggaggggtgcaagcgcgcccgacatggaggcggaggcgagagcgtcacgactggcggcgcgaccggcggcaagcgcgcccggcatggaggcggaagcgagagcggtgccgactggcagcatgaccggcagcgatcgcggaggcgacgacgacacaatcaaagatgaagatccggcggcagagacaaccatgtgcggaacggagaggtatccgccgcgctcgtcccccaccccagcctcacatgctcccgcgtcggctcgccgctgccgccgatgtcgtcgagcgctcgagcggcgggagccgcattggccggatttggccgttaatgaagagctcacctccaccgccgcaccttcacttctggggaagggggcattgcgggcggggctggacagaacgctgacaaacagggtggagccctgcatgcgctgtcacgtcagccgctgccgtcgatgaggtggtggtcgccggagacggtggcagcgaggtgatggtcgttgtggaggtcatggttgtctccgccgccgcactcagatgccgcgatgtacgattacgattacgaggctgaggaggactacgaggaggagctctacctgaccggccgagctcacgccgatccgcctccgccaccagccgccgctgctgtctcctcgagtgaggtccctctccgtcctcctccattcatagacacagagaaagagagagaacagggaagtagggggcaatggggattggagagggcttgcttgaggaaagagtagacatgtgggcctagattttttttctgaccggatgccacgttggcggacacgtatgcaaactgaagtcaaaaccacttggaacagcgttaggggggttattcatccagtatgaatagtagagggtgaacgatgtctggttttcgagttagggggtagatccgtactttttccttaaataaatagaggtccaaccattgagactacctttcctttacgtactgtagatcaacaaggtggtgactatgttttttgaactgatcattctgcccgcggacaagttacgcatgtgctgacgatcgatcgatcgaactctctcaaccgacacaggccctgtttggatcctccggactattagatagcccttcggaatcttactatttaggagtattaaacgtagattattgataaaatccatttcataatctatgggctattttgcgagacgaatctaacaaggtatattaatccattatttgctacaataatgctacagagacacagcccatcctttccagtccttcgatcggtcgaactaaacagctccatgttgaaaatcccgtgcttgatgctcataaactgccgatgctaacaatatataggctgtgtttagatccaggggtgtaaagttttggtgtgttacatcgaatatagggacacacatttgaagtattaaacgtagtctaataacaaaacaaattacagaatccgcctgtaaacgtcattagcaaatgtttactgtagcaccacattgtcaaatcatggcgcaattaggcttaaaagattcgtctcgcaatttacacacaatctatgtaattagttattttttcgtttatatttaatactccatgcaagtgttcaaacgttcgatgtgacagggtgaaaaaatttatggggtgggatctgtggccatatatctcgcatactactgaacatttttttcagacgattaaatttgattttcacatgcgggtgggtgatccatctggtgtatgtgaaaatcaaatctttgcatacgggtagaacaaccacgtgtgaaaatccgattttcgcatgtcgtcgcttaagccatctgtatgtgaaaataaaaagttttaaaaaaagatccaaaccctagcccatggattcggcaccacctggtcgccactgccactcaaaaccctagcccgctgcatctacccgagccattgttgcgggggaggctggccgttcaccgtatcgacgcaggggcgggtcatcgttgccggatccgcgcgggggacaactgccgccgccgtgcgcctcctccgccggcctccgcgcgggggagggccaccgtggctgtcgtgcgcctcctccgccctccccgctgccgtcgccggaggaaagagtgggaagatgaggacttagtgggagagagagaggaggagataattaaaaaaaacaattggttattttcgcatgcgaagcactaaaaggacaacatatgaaataagcttatttttgcatgtggctccctaagagacccgtatgcgaaaatagatttgcatgcgggtctcttaaggagctatatacgaaaatgatgttcgatttttttgcagacaggagcagttatggtttgcctataacctatagggttcctcatatagaaaaatcatttatatattagtgtcgagcgctggattccacagtagtactacaccatttttagaaaagaaaactgctacaacacgttacagaaaattccaatcccacgtgtagtacttcttttaaggctcgtgtatcccctaaaccgtaacttcctctctccttctcccgttcccacaacttcgttgccggtcttgattgagtttgcttccttcattcgatccttcgctgccaccgtcgcgttgctagtgctgaaaaagaaccaaccgtgccggtgagacacgccataccttcgatctcctcctctcgccttctcagctcttctccatcgtcctgccttcttccccatctccagcagctctttgctgtcggaaattcccccatcttctaactactcactttgctttgccctcgccgtcaacatcggcttaccgcctgctatcgaccctacaactttggttgcaacactgccgcctcgctgcccactcattctgccgtccaccaccaggccgtcatctcccacggccatctctctaaggctggcggacccctcccttccccctcccccacctctaacctcaggactctaactggttgagccactgtcatctcgtcggagctgaagcataagaagtacaacatgaacagtaatacgattcaatggtgattttatagaaatccactctaaatttatatcaatgaaagttaccaattccgtaaaagggaaaaacgcagacacacacacaaaaaaaatggacatgctatatttatggcgacacaaaattagcttgatcacagtcggtcaatctgacccttggataccatgtagattgatttaaggaacctgttgctcctgttatacattagtttttcattgaatttgcactagcatctcttctatttatatctacttacatatgtaattttgatacttacattataaatgcactaaaattatatatataattttatgacttacatatgtaattttagaacttacatggtaaatacactaaaattatatatgtaatttaaggacttacaatgtaaatacatgctgactattttttggtgaaaaatatggcgtcataaatataaatatagttataaaaaaaaggacaagaaaacacaaacacagctgccgttttggcgtttgcgcgcggcagttgagcgtcgtcctccgcgtgatcaccaatattcacgggccggggagacacaggagcagcggaggagagcgtacgttacgtttacgttttcaaagcgttggacgccatcaggcggcagccgcgcatgctgtgcctgtcctctcctcgtgtctcctcgttcacattcgcccgccgcatgcagacgcaccgagcagccacgaccggtacacacggatcaacaacattcacgcatattccacccaaggtttgtcaggatcggggtactaagtagtatcgttttgttccaagtaatatcgtatcatagtatcgggatattataaaatttattttttaaatttaattaatatttagattaattatatatagctattctataaaaaaatatagtaatgatatatgtcatataaatagagacatttatcaagagaacaacgttggttttgatataattaactgattttatataaatttgagcatatttatttatattattttcaaaccatattattttaaataatattttgtagtatcgtagggatcgtagaatcgggataccacctaagattttgtaggatcgtgtagtaatgaatagtaggatcaagatactgtaataattaggatactaggtgggatcggtatcgtttcggtttgaataatgacaatattataagataataggatacaaatcgagatacggacaacattccacccacacatccgaaagtagcacgtcaccccggcaaaactgacgcgtgaggcgtgtagcatcaaccagaccaatcaaccggggctgctcacatcggagtaccttttttttgtttttaagaactagtacatcggagtactaggtttgcatatattatgccatatgagaaactggtttcggtataacgtcatcgctcaaatcagtagggagttacaaagatttttaaatatagataaactttactataaatagcttttgatatagaaattttatcactaattcattcaacaacatagaaatttaatggagttttcttgatttcttcgatgagcctaggcttgatgagctccatccctacctccaatgggttttgacaaaaatgtcatgattaaatagagggtattcgctagaattaattaatgacatcatggataatattgtctttcggcttttctacttcctcgctcgaacgctcgaagagcccaagctaggaaagcatctataccggggaactggacgttggtaccaatattggtgacagggtgggtgagcactagcaggtgtccaggcaggtcgcgagctctaggtcatggctaacgtagtctatgctcttccggcgttagggcatcgatctacaaccaaagctactcctaaagtgtcctcactaactgagggcactctttaggaaactcatcttccaatggaggatacccctaatgggttcttcaaaatatgagaccacttaatgaagatactctaatccacaatgggtgtcccagcccaaggtagccccaggtaaaaaatttcacccttacccctccctgccagcccagcctgcctacccacgcctcttcctctcctcactcatttcggtctctctagcacacccatgcctcctctcctcttctcgtcttctccacccgctatcgcctcctctctctctctctctctcctctgccccatcgtgccgccaccgcttttcctccgcccgtcgccgctggtggccgacggcaaacgacgagcagcgtgggcgagacgcaacgtcgtggagtcgtcgtcgtcgtcttcatcgcatcgccgttgtcttcgttgcggggtcgtcgccggccagaggcggcataaccggcgccctgcggaggggtcggcatggagcggcggcgccgcatcgaggaggaatggtggcggcctgatagtggccgcatcgacgacgccgaggagggcgtcctggtcctggtggtagaggcgtctatcttcctctccctctctctcccgtcaccggcggctgcgagggcgatgaggagggccgccgccgccgccggagccacacctctctccccctccaccagtcgccgcttctccctccctccgtggctggtcgggaggccagatccgatcgcccgcaatgtgcccaggccgtcgcggctcctccaccacttcaccgcctagccgaggacctcaaggagaaccacgggcgagagtgagaggggtgaggggtggaaggggaatttttttggctgggaacggtgtccacgagccacacctcgtgcccaacgcgttcctcggctgcgtgcctctacgaaaagtgagctagggccgcgtccctctactaaggcgtgcgttctatcgttgggagacgatgcaggcaaaaaagaaaatggcgaccgacgacgtgtgctagggctacaccccaagggcacccaatgctgatgctcttagagagagaaataagaagatccaagatcaatatcgtccacagtgtattttagcgagcatccccatttaaccacggatattttatcgaagcccgtttactaggtaggcaaaatatgctacgggacactcaaaaattatgtaattggctgagggacaccgcaaaaacgtgacactgctgatggacactacaaaaatttgtgtaatttgctgtaggacacctgaggtattattttataatttatgggctgaaaagggggaaaggaatttcaaaatgacaggactgccctcggcggcgttcgtcgcgccgtgcacctctctgcttcgcccctgaacttgagacagggctgctgatttcctcgacgagcttccggatgtctgacggaggcggcagagtcgacgctgtcgtcatcgtccaacgttgggccacatggtgcgcgatgttgtcgccgacgctgtctcccatgaggaagctggcggagagttccatggggacgtcgtgctcatcgcggaggccggtggtgatgaggtggcggaggacagcttccccgtcgtcgtacgcagcagggaaccagtgctcggggatgagagggacatgagatccggccggcgcggcccacgagatcagcgtcctgtgcgacgctgaggtcggcgtcgtcttcttctccagcgccgacaagctctacgactactgctcccccaagaccttgtgcgtgccctccgtacgttctcactcttctcttctcttgttcttcagtgtattctttgtccagataataaggtgtatatatgcaagaatcattttgatgcaacagctacatggaatgtccccggctgctgctgctgctgccccgcctcttgttcgatggcagagcggacagacgcacgacgcgggtgcctctgggggtattcccgtcattttcaaaatttctctctcctctttcaacccaaaaattataaaataatgtctctagtgtcttatagccaattacacaacttttacagtgtccattgacaatgtcacatttttgcggtgtccctcagccaattagacgatatttgagtgtcccgtagcaaattttgtcttggtaatactaatatggtactactgaagaaaaaaccactttttgccgagggcatatatgcaattttcaaggaaaccgtcgcgcttacgtacgctacttggactagcccttcacatccgcggagatcccaagaagacacgagtagtactcgcagacaaattctcctcctcctgaaaatccagtgaactgcagcagcagcagacgagctagcaaccatggcgtcgtccacggcagccgacggcgacgacgaggtggtacgcgagttcggcccgatcctccgggtctacaagagcggccgcctggagcgccccctcgtcgcgccccccgtcggcccgggccacgacgccgccaccggcgtccactcccgggacgtccacctcggcgactactccgcgcgcctctacctgcctcctcccgccgccgccgccgagcgcctccccgtcgtcgtctacgtgcacggcggcgggttcgtggcggagtccgcggcgtccccgagctaccacctcttcctcaaccgcctcgccgccgcctgccccgcgctctgcgtctccgtcgactaccgcctcgcgcccgagcacccgctcccggcgggctacgacgactgcctcgccgcgctccgctgggtgctctccgccgccgacccctgggtcgccgcgcgcggcgacctcgaccgcgtgttcctcgccggggacagcgccggcggcaacatctgccaccacctggccatgcaccaccaccacgacgcgccgccgcgccgccgcctcaggggcgcggtgctgatccacccctggttctggggctcggaggccgtcggcgaggaggcccccgaccccgaggggcgcgccaggggcgccgggctgtgggtgtacgcgtgcccgggcaccaccggcatggacgacccgcggatgaaccccatggcgcccggcgcgccgccgctggggcggatggcgtgcgaccgggtcatggtgtgcgccgcggagggggacttcctcaggtggcgcgcccacgcgtacgccgccgcggtggccgcggcgaagggcggcgcggcggtggaggtgctggagacggccggggcgggccacgtcttccacctgttcgaccccgacggcgacaaggccaaggagctgctcgacaggatggtcaccttcgttaacggcgccggcgccgacgccgcgtgatctccgagttagcggccgcgcgccattgtttttgcttttgcgtgtgcgaaaaaaattccctactttgatttgatgaactctgccaagctgtgattgaataaatgtgtgatttttatggttgctgatgcataatgtgttaatgaaatgcccgaatttcctacatctttcatatgagaaaattttgagctgcaaaacattaaaaatggtggctcagtgaaatcttcgcttaccttaatacggtaaatctcaagaaacggttgaaatgtttggttgacaggggtatgtggggcttatgattattacaatcttggcttcagtgaatctttttttttttccgatcccagatagttttacttgtaactgggttacggttgttgcttctctgagaacatcactcaggatgtttaagccggattagttacagtcgccttgtatttgtcgttaattggatgacaatatatagtatttattttaaactttaaagaagagttattattgatttggaagctacagtaaatataaacatgattgtacatgcaaccactgcaactgtagcacttattaactactgcacctgcaacattattagagcaaggctaataatacagccgacccgttggctataagattatttgtagccttctcttagcctacccatacaatagttagctctttacaatcaatacagggtccacttgtctctctcaccgagttttttggttattgtgtctaagccggctgtaagtttacagcccgcttcacctctctcctcacttctctcctccacctcagcatttagccggcttatagcctactattatacttgctcttagatatacacaacaccatcgttgacgttctttaaatgcggatgtcgctcttctttcacaaattgatgttcaggctgtgtttagttcgtggtccaaaatttttttaagtatacagacacatatttgaagtattaaacgtagactaataacaaaacaaattacagattccgcctataaactgtgagacgaatctattaagcctaattaatccgtcattagcaaatgtttactgtagcaccacattgtcaaatcatggcgtaattaggctcaaaagatccatcacgtgatttacatgcaaattgtgcaattggttttttcgtctacatttaatgctctatgcatgtgtccaaatatttgatgtgatagaaaagttagaagtttgaaaaaaaaagtttgaatctaaacacggcctcagcatggagaatgacttatgtagttttttttactgggaaacagtgggagaatcccccacggtaattttcattatatagttatattgtgtgaaactattatagactttcgaggggatgttccctcgttttcttttgcatgttacttaaatggttatgaaaaaaattaagaagatatattaacatgtgatatatcactccatagacatgtaagttgaaattcaacttttacatatcacaacgaaaaaacaaattaaactacaactagttaacatatattcacagtcaattttttttcgttacgatatggaaaagttgaattttaactcctatgtttacagagtgatatatcacatgttaataaatcttctcgaatttttaattaaaatttttataacaaattaagtgacatgcaaataacgagatgacattccttaagagtttaaaatccactttccttatattgtatactattttactaatagaaatataacacaaaaaaataaataaaacacataatcttttcatatattaataactccggaccattaagagtaaggctaataagagagtcagcagtgggctctacagtaatgtcgtgtcactagaagtttacttaggattcacttatataataaactggctataggattggctgttagtctactctattgccaattaggaatttaatgtctgcattagagatggcaacggggaattaactgacgaggaatgtatctccgcccacgcaagccaaaacttttcttgtcaccgtcccagcgaagtacgacggggatactttcttcccatgcctgtccccgcattgggaattaatccctgtggggtcttcgtccctgcttaaaacaatatatacacatcaaattatatatgcaatacaacacatatattcatgttttatattaatatatcaatatatatccattaattcacataattaaacataatattatcgtttataaaaaatcatgtaatataatcacataagataagtaaaaatagttgaacttgatccctttgcaggtcttcacgggggacggggacggggaacggaggatcatccccgtccccatgaaatccaacgaggacatgattcctcccattcaatttcctatggagaaccaattctaaccatcctaacatattaataggagaattccttgctgggaaacagggaatggaggcacattgccatctctagcctacatgtgcagatcatctgctgtggttatatctttgtggctatttcatcaaataagatacttgtgtgctcagccataccattaccaaaacaacaaaataacacatgtacaatatattcatatcatggtgattaaataagaaaacatatcaaaatatgtgaaacaacaatcataatgatagcaatcatacttagaaaaagataatacattctgttagggttactgtcggtgatatgggcccgggggtatcatgtttagagggaggaggctgccccccaaggccacgtggccctcccccgaggggagtgaggcccgaggtggggtggcggccactccttcccatagacaagtcggaggaggctgccccctaaggccacgtggccctcccccgaggggagtgaggcccgagatggggtggcggccactccttcccaaagactagttggaggaggctgccccccaatgccacgtggccctcccccgagggggatcgggcccgaggtagggcggcggccactccctggccgagactagagggagaaggctgccccaggcgccacgtggccctcccccgaggggggattgggcccgaggtcgggcggcgtccaccccttcccgtgactaggggtcgggctcccccgaccccctctctaggtcaccacgtacggtgggttaggtgtccgcctccaggtgcccacctacccgcattaatggcgacccgagcggtcacgccacgccgcatttaatgcggtgtgcagtgcactcaaccggtctgtgaccagtcgaatgactgatgggacccaggatgtcaggcgcaccatcgcgtgtgtcaggcgacgtgcagcccgacatatcccatcaaataatgatggtgagaggttctcatcctcttatcccagccggagtcggtcctcccgctctggtcaaagcaaggctcctgtttcccggtgtaataggagcccagaagtcttcacccattaaatgatgactgacaggggcaccccccgtgtcaggcggcaagatttgacaggccccatcatcaagacgacgtgcgcttggcttcccaagtcaagagacaagacatgcatttaatgcaaagattataatacttctccaccggagctaggttaggttgttgggcccatgtggtaaccccttgaggtataaaaggaggtctaggcctagtggtggagaggggggacttctgagcgaactagcacttgagtctcgcaaccccaggcacttgtgttctacactcgaccataatcccaaacacaggagtagggtattacgcttcttagcggcccgaacctgtataaaccccttttctctcatcgtctttgggggattgaaccccctcaagatcacacagcttcgctcaccgaatcctcgaatctcacccgctgcccccggctgaacttacaaaggggggcctcacggttccctggtggaggagttcattctccgacagttacggataaggcataccctctatcctacgacttatgaaatatacgaataaggtataccttaacatgtacggatcggttccgtatacgctgttgggaagccgtctcgaattatggaaaatatctctataagttaagaaactacaagagtcgtactcggaggggatagaacctctactataccgtgccagattacatatctccaagccttacttaggggtcaagataatctacggtataaaaggggacccctggggggcggtaaagatcatcgaatctctttgccaacacacccatcgaagtttacgaagccagagtacgcggagccaacttgccgggagatctcgtcgaatccctcgaggacgatctcatcggtaccctctgtttcaactactctctttgtatctgttctcgtcatcataatctcatataaactggactagggctattacctgttaaggggcctggaccagtataatccctgtcttttgtctgcttgatgtcgtactacgtagaccctcgttccaacgtaccccaatactcaactcatccggtccgcgagtaaccctcgttgacacattcttctcaaaatataatgatttttagggttggacacagttattaagaaagtaggtagaattaaatgggaaaatattgtgattggttgataagtatagataggtgagaaaattaaatggtggaggtttgtgattggtcgggaagagaatgttgatagaaaaattattatattttagaacaaattctaaaggctaaaacatattatattttaggacaaatgcaataatcgattaattttgagtaccatgcatacagatcaacttcaagcaacgatgttcatcttaataccgagatgacacaatttttaagcaatatgccagcatgatcgtggcacatggcagataccaccatgacatagacacttaaacattacataaatctttctaaaaaagtattttaaaaaatactgctaaataagtctttgccagacaagccattaataattaatctagacaacgagaaaggtacaaacccatggttcaaacttcaatagaaaggagcaaccgacccattcgcatcagcaaccttcagtcactacatggaaagagaaaaggaaacaagggtatggaataaatatttagccaatgcaatattacaatttgtactatcaaacatgaccatggtgtaaataacctgtcactgtcacgtactccctcctttcctaaatgtttgacaccattgacttttttaaacatgtttgaccgttcgtcttattcaaaaacttttatgaaatgtgtaaaactatatgtatacatgaaagtatatttaacaataaatcaaatgatacgaaaagaattaataattacttaaattttttgaataaaacgaacggtcaaacatttttaaaaaagtcaacggcgtcaaacattttgggatggagtatttatttttgttaccattctatgcttagaggttcagtacatatccgcaaataaccaccgtaccaatcaacagaccatagcacaatactgaaagaaggtacatgcaagatatcgtgttggtccatataaatctcccgaagcgccgtaggatcggtgaaaatttagagcgccacgtcagcccattttttgcaacgtatccccacactttgagttaattacgcatagatccctgtaaccatcgaccgtctgatcttgcggtaggatcggtctgaccatacacgtgtcccccttgccggcccttcctcatccgtgggatcgtccgatcacgaacggacggcacaaatctcgcccgcccacaccaaaccctagtaatattatagcaaaagaagaacaaaaacatgcatatattagtatcctaccatgacaaattgcaaatgatatttccaaacctattccaaatgggctcaaaccaaatcatttttaagttgagtatgccgttgataagaacggatagtagcttttctgcgcagcacatcagcgatacacaaattaccaccaacatctactttaggtggcaatgcaaatgataccctctggatattcgtttaagtcaaagtgaatggtagcatcatgtttctcatattcgactatcatatcataaagaaccatataagctagcatgatcttcccaacactctttcacttccacaggcaagcaagtcgaggaacaatggtaaaaagggaatgcaatactctgaaatcacactccacatctttcgttgccccttcttatttcttggcaaacaactcatacttctctgtttgggtctttggggaagtggtatagtcttcatgaaggcaacccattttggatatataccatgaacaatatggtaacccgtactatacttagtctcatttattgaaaacataacctgatgagcttctcctttcgatgcataaaaaacagtgaggattgattgagcacattaggattgttgtttaacccaacaactcgaaagaaaacatgccaaatatgaagatcctgagagaaaaaatagtattgaataagagttggagtgtaaaagcctcctaattagtactacctccatattttaatgtatgacgccgttgactttttgtccaacgtttgaccattcgtcttattcaaaaaaaattatgtaattatcatttattttattgtgatttgatttatcatcaaatgttctttaagcatggcataaatattttcatatttgcacaaaaattttgaataaaacgaatggtcaaacattggtcgaaaagtcaacgacgtcatacattaaaatacggagggagtagtgaataagagtgggaatgcaaaagcctatatggctagattggggcttgtgaagacttgaagtaccatccaaattttactgcactgtaatatcacaagcattatcaaacattctctatgcatttgatatgctagaacaagaataatatattttctcatatatcatgtgggcttaatgtttccgatgctgcttagagctattattcttaccgggacaatatttattaatttccgtgcgagtaatttgttatctttgtttatagttgctttacgccctaaatttactggtccataaaaattacactattgaaaaccaatagttagacattaaaaaaaacccaattacatgcaatttaaagttcattaaaccgataacaccaccatcgattaaacttaattaaccttaacagcttaccaaaatagcacaataacagccgctcgttcccatctacgggggatgcccaaaagtagaagcgagctgagagagcagcaactcccacccttcccctaaaaatcccccccaccccacgcctccgggggcccacgcgtcagcctctcgcatccggcgcatctgacggccaagcgcccccgcgaaatcctagatctgacggcccagatccgtttctaacgacctatatatattccccgcctcacccaacccacgcgctcccctcctccgcctccactcctctcgcgaccaccaaccagcggcttcccggcggcggcggcggcgcgcgcgggcgagggcgagggcgcggcgaggcgatgcagatggctgcggcggcggcggcggcgagcaccgaggccccggcggtcgcggcggccgcgcctcaccaccaccacccgcacccccacgcgcacgggatgcacccgcacgcgcaccaccacatccaggcgcagccgaggtgggtggtcatcccgtacccgccgccgcacggcatggtggccgccgcgccgccgcctcccccgccgcagttcgtcaagcacttcgcgccgccggcgtcggtcaccccgccgccgccgcagcaggcgcagcaggcgcaggcggcggcggcggcggccgggggtggatccggcggagggaacggggacgagaaccggacgatttgggtcggggatctccagtactggatggacgagggctacctgcacaactgctttggccccagcggcgaggtccggtctctccctcccattcccagctcgctcgctccccccgatccagccttgtccgtaccggatctctttaattcagctagatttgttgtagggatgcgcgctgattcgttcattttgtgccgcgattgggatggaaagctttgttttgcggctatttcttgtttgtgtatgctgtagttgttagttttccgtaggatttggttggttgctgctaaaggcgccttaactttgagttcatttaatgcagtatgagtgaatacacgagtaatttcgtggctctttacaccgcgatttctagcgtgttgttgtgcattagccaggatgtcacagttttccctcttttgctgtttggttttccatgttttgaaccgtggtgacattctacaatatgtaagtcgtgtaggattcatgatggtatatggttacagcatcatcatttacgttgtgactcgtgtagtgggataaatttgatcgtaaatgttgcgatttgctaagaccgtaaacatcttcgcgagtgttgctctctttcgtgccctctctttcttgcgcgcacgaggtccatagcatgcttttgcctggatatattggcgcttggttgtaattatttaactacattaaattgttgatcatgctagttattatgcaataatttcattaaatataagtgtatgtttatccctttcttcgttttaactattggtctatgtaactatattaatagaatgttttggaagagaataagtattttctagtactagcagagtattttttcccatctggtcaattgatgtatcgaatcttaattaagccatgtatggacatatggtggacaatctaatcctccatagatgttccgatacgcatacgtgcccaaaaaccatctaaatacgatccaaacaactcagtgttttggggaaaggtatggaaatggccaccatcatcaccaactacttttatggaagtagaaatttactaagtgaaaaaaatatgtatcctaaaagaggggaaaggtatggaaatgaccaccatcatcaccaactacttttatggaagtagaaatttactaagtgaaaaaaatatgtatcctaaaagaggggaaaggtatggaaatgaccaccatcatcaccaactacttttatggaagtagaaatttactaagtgaaaaaaatatgtgtcctgaaagactaaatctttctgtcggtatgtcctctgtgcattactaatttccatttttttttgattcctacctgttttgtaggtggtcacaattaaagttattcgtaatagacattctggagtttctgagggttatggttttgttgagttcttttctcatgcatcagcagagaaagcactccagaatttttctggtcatgtaatgcctaataccgaccgagcttttaagttaaactgggcatcatatagcatgggagaaaagcgcgccgaacttgcttctgatcactcaatatttgttggtgatctggctgttgatgttacggatgaaatgttgatggatctttttgccaaaaaataccgatctgtgaaaggagctaaagttattattgatgcaaacaccggacgttctaggggctacggctttgttaggtttggagatgataacgacaaaactcatgcgatgactgaaatgaatggtgcatattgctctacccggccaattcgtataggacctgcaacacctagaagatcttcaggtattaccaaatttgaagagtttgttttgaagcactctgtttctgtcctgcctatcatttaaagtttcctaaatttccaagtgttgtaatcttgtatggcctggtcagcctacttcagcttcagcgtatggtctggtggctaaagccagggccaacatatggggggaatatgtgggtgggtgtgaaagagtacaatatagtatcacatttgaaaacattctaggtttgataattgtttctcactttctcccattggacatatttttaatctttatattatttttacttcaggtgattctggctcctcgccaccaaggcagtcagatagtgactcaactaacaggacggtatgcgctacttgtttacattgctaatttgttagcttctaacataacttgtaaagaaaaaaaacatcttatatctaatattgctgcagatatatgttggcgggcttgatcccaacgctactgaagatgaactaaggaaagcatttgctaagtatggtgatcttgcctctgttaaaattcctgttggcaaacagtgtggttttgttcaatttgtcaacaggtatatctaaaacattttatccttactcgatgcatccttaagtaataaattgttgaatgcttaaatatttatcgatttactggtaaaaaattgagatcatgtaaaatcgcacatctttgttatgtagacctgatgcagaagaagcactgcaagggttgaatggatcaacaattggaaagcaggcagtgcgtctttcctggggccgcagtccagcaagcaaacaggtggggacttttgactcattccttaagttactcactttaactctgattgacatgttcaaaacttgataagtggagaattgcaaatcatcagtgaataaattttccgtgcggagtctaggaaatgcatcatatacatgcatatgggtatcctatccaaagcgctttgcagtttgtggaaggatttacaatgtatggaagggagtaatcttggtttaaatacaaaacacaaaaatgaagtgcttttgtctttgttctgaatcaacaaatgaagaggccttttactcttagtatatcccagtagcctgacttttacaaggtcacatgtgtactcgctggagtacactatcaccactagctaagactcttgactacggcaatggttcaagaatttgtcctctttgtcaatgaaatcaacctattcaatcatggatttgctgcatattgttgattttgcctcaagctagacgacccgaaataaatgtgtcaagataggacctgtttgcctatgctttttttctgcctactgcctagaggcttcaagagcccctacataaggcaacaaggcacctgtgcttgacagcctgagatcaacttgctacaggtgttgccacttctcatggagcaatctccttgttagagattgtcaaagatctgatccatccaactttagttcctctgatgctgccttgtaataccccagcttccaaaattcgaattagcacagctctaccaaggagcaggtccacctacgcataggatattgcaccccacctatactttcttcctcacttcatgaacaaatctaaattctccatgtaggactaatctaacattctaaccagcaccacacaatgggccactcggccatctactaattggctacagtgttaacctcactcctcttaggaactagcacccttggcagctcaaatgcatacgcactcatacagtgaatcttctgctctgataccaactggagcatcctagcttctaaaatgtgcattggtccaactcttctgaggagtgaccgagtgagcctacatacgcatagcaccccacttacagttttgtgctcactttgtaataaaagtgttaacatggaggtgctatggctggagtgtgtgttcttatttgctgaattcaacatatgtaagttcttcatgtgactaatcccgccatcatcgcaccatagggcacacaggcctctaccagtggactgggaaaactacatgcttctaaatctgatcctcctactctagctttggagattttcgaactgatgttgttgatctccctgtccaaaactagttgcataatctccatcatctttagggccatgctattatgagctcatctgccacgagcggtgcatgtgggatgtcatgaggggtgaatctgactagtgggcggcaggcactgtgcatgtggactctacgtggcataaggctggtaggagctgctgctgctcatgccttcatgtgctcatccaccacttcagtagcttatccgccatcaccatcagaatgcaaggaagactttgctgtctgaatgcatactgagatggttgtgtcatggctacttttgggactcaggtgtctatttgccagaaaacaagaaaggaaaaataataacctagttagaaagtggtaaacatgacctagttagacagccgtaaacatacctaagtaacctggttcacgggacaagccagcgttccaagttctgggaactttgtccctggttgagggtcgctgcctaggtcatctcagacatcgatgggtcgctgcttggtctatgggatccatggcgtcgcctcggccagcagacaaagctcgagcagaagggggaggtggtgaagagaggaatggatggtgacggagatgcggtcaatgccctcgagtcgacttgctcgtggggccagtgatgtcggcagctgaggatagcagaggctgcgagccatgtaggaaaataagaggtaggattaacgtgggattaatgtgttaatgggccagcccagcccacctggccgagttcacaacatagagagaaaggagaagtgactgggtaagattgaagtgctaatggtaggctctcttatcgtgcaaacatcgctgcccagtcgtctccaatcttgtcttgttctgaatgtatcgtcccaaaaacattttagttctcaacccatacctgtaaccagcaggtaccctgtcatcccatgtttttggaagatggcatcccccattcctcattctggttccttgaaccattgacctgggaacttctgtgacttagcttcaaacttcactggtagcgtgagttctttcttctgctgtgcatatcaccaagtataccacaacatatattattgctacctttttgaaacctgtttgtatccatgtctggatgatgcaagggaaattctcatcaaatacaactatttgtcgcttctcagctttaatactgtgtttctcctgggacttaaattttcttgttgttgcatggttactcttgttccatggagttgctgtgacttgtgaatgtgatgcttactcatgttacttcttgtaagctcaaaaaagctttacaatacgtatggatattgttatcatctctattcattacccaccatctgttaagtaaaatagaggtgtttgagctaatttcttctgctcacacatttgaatttctgttttttcagtctaggggtgattccggccaccggcgcaatggcatgtactacggtacacctttctacggtggatatggctatgcgtcgccacttccacacccaaacatgtatgcagcagcatatggagcctacccttactacggtaaccagcagcttgtgagttgatgagaggcttctctcttgtttcctccaatggaaaacgaggttttggtccagtaagcatagtagcgtgtgatgagatatttatagatggccataaagaagttggtgagacagcaggtattacctgaaatggtacctgcagatttgtgtcagtgagtaccgagtagaacctaaaaagcttgtagacaaaataagagttgttcttattctttcaagaaattttgactcgctaataaaactgagctatgtgatgtgcgactatttccttccttctgcaactggtacaacttctaggattaatcgtcatatacatgatgcttatctaggagaaggtttgttaagcttattacttatgcttctcgtaaacatgatgtgcaaataggatgatttggtgagattataaatgcctcgcagctgggagaattcagttatttctgatgccgctattgaatatctaatgaccttgcgtgttgtaattagcttatgaagctatcgattattcgtgccatggaaaagtattatttttttaaaaaagaacatcagcattgtttagaaactttgttttttttttgaatggaacattgtttggaaaatttgtctaggttatttctagctttataatactcagaaagtaatatttagttgatcactgtaagtaattgtggcttccttagccgatgtgctctccaatttccccattatcgtgttggcccaggacaggcagacacggctaggcacttgatgcaaatctgcagcatactacgggtctgtttgaggagcttaaaattctgagaagcagctgggtctgtttgaggagcttaaaattctgagaagcagctggtgagagattttgagaagcagctggtgagaatctagagaagctgggtttctcaacttctgacttctatttcattttctggcttctactttattttccatattctagaactacggattctcagaatctgagtaaaaagcttctgtcaactggagattctaagagaaactgtagctgctagaagctcccttaaacagtccctacaagctagagtgtcaactggagattctaagagaaactgtagctgctagaagctcccttaaacagtccctacaagctagaggatagttgcaggcttgcagccaagccatgaccattactatcagaacctttgctgcttggcttcttgcttaccgagtactccgtccatccttaaatatacttcaactatcccaaattataaggtctatatttttttacacggtcttcgatgatatattttaatcattaatttattttatgttatgtttccaacaaatatgaaattaacattatatgaaagtactttaaaatatgaatatagtaatataacatgaatatagtgaatatgaatatggtgatataacatgaaattatgcatatttcgtactaatcatatatatgctttaaacttgatagcttttaagttttggctaatttttggacagccacaaacccatggccgctacaggaacttgagcagttttcttttttaaagaaaaatcttcaacaacattttaaagtttgtgtaatgcacatgtaacacatgctggcatggtgcacaggagtgtgagaaaaccgctgcaacagttggtacactgggactgctgctggtgtcgacacggtcgccgtatgcagacaaagagcaaagcacaggagatggtgcttcatgattcatgaatgtgcccggcatatggcgtgtacagcagcagccagcaacaggaactacaggaggaggatgagctttccaccaacggacaggggcactgtgtgtctgtgtgtgccgatgccgatcgatcccaacccggcccagtcctccataaatttttggagctgtaccagagacggctcacgggtgctactattctagcctgatgctactgcctctcattcccccgctcccccagtttccctgctcttttattatggagctgtaggagctctgtaccctgtaatggcaactcgttaaaaagaaaaacaacgatgacttgtaatggtacatattcttgaaaatttcggtagttgccgagggggctaggttgtactccctctgtttttatttacttgtcatcattattgatgtttcacctttcatcattaataatagagtaaattttagaaaaactgtaactttagtgataaaactatcagtttgctgcaacattagcgacatgtttcagtttatgcaacaatagcatgagaaatttttacaacactgtaacttttacattatatgtactgtatataacgtaaaagttatagtttttgtaaaattttcctatgctgttgttgcagcaaactgatagttttgtcagtaaagttgcacttttctgaaatttactcttaataatatttcaatttgttatgctttgttaaatggacattatataatcatatttagctagcatcaacacattttcataatataacatagtacgtttctttttgagagagggtacatttttttatatttataaattattgctaaaatatacgtggacagactttgaatataaatatgaacagcatctagtgacaattatttagaaacggatgtgttatttaaactttgattgtcttgatatattgatgcataaatcctttttacatgttagtaaaaaaaaaactgtcctatctgctcattcacatttgtggacatgccacattcttcgaaagggaaataaagccataaattagaagtcatgatatacatgcaactaatgcaatctattatttatgttggataccttattatatttattgttttttccccatagttgtcatttcttttcaaacctagagatttctaatgacccacaacttgagttcctcctaacacctttgatacctcccgcaccaccttctactcctccagccttaccccgtgatgaagctaccctagctagcccggacagccgctagggctcgtggtgaaaactttattaaattttaatattgatgagtaaattgatgatgggatttctataacaaatataaattatattgaaatttatccacactcaaaaatcttccaggctccgccactaggcctaccccgtacgtagctttgtgtctcctaaccagtgaaggtgaaacatgttggctctatcctcaccatgtgtcgaaattagaatcaagctatgaaagtggatggattatgagacaagggatttatacaggttcagatcttcttgataagaagtaataccctactcttgtccgagaaaatattccgctgattgtggtattaatctgatgatcttggatatgattctgcccatattctccacaccatgccacccccaagtttttgcccttaacccttctctccctcgtccctacaactaacccaacaaccattatccttcacactgtttccttgcccttccatcttgatcaccatggagcttctactcccgtggacacaacacatggaagtgtttgtcttcttctcgccgcctctctcctactcgcaatgctccaatgccactaatggtgaattatgcagaaggacggtccagctgttcgggttgatgccgttgatccatccaatggccaacaatagttgatcgctgaataagtacttgagaaaaaaaaacatcatgtccttgcaataatgcatcttctctttacaaaatacaaaatatatcacggaaaacattagtaaaagggtaattttaccatccttacgaaggtatccagaggtaatatattttttagcgtaaaatttgttacctctaggtacttataatatcttaaagtataaaaaattttagtgtaacctcaagatattttttttcaagtatatgaaattcctcttactacaagcatataatggtaggcacgcaaaagccatgtaagttaccgtggatgaaaattctggtgctttaaaaatgtttggatattggaggttagtgtaaaggaggagaggaggtttgtcatctgttctgtagtaacaaaatactggtatagggtttacgcgaggccactgtacaatacttcctccgtcctataaaaacccaacctcatattggatgtgatattttctagtacaacaaatctaaacatactcttgtccaaattcgttgtactagaaaacgtcccatccaatactaaattagttttttttgggaaaagtccattttacaccctcgaactcttatacttgtctaaaatacacctccgaactacaaaaccgggtatagtacaccctcgaactatcaataccggacacttaaccccccaggctgtttttaccgtggtttttactacgtcggatgccacgtcagccctcgccacgtcagcacacaaggtaatatgggccaagcccatactctgttcgttcttctctccctcccctgttcgttcttctcttcctcacgaccgttggcggcggtggcggcggcgacggctgcggtggcggcgcggagctgcgagggcagtgacggctgcgagggcggagctgcagcggcggctccccgttccgcacgtggccgccaccagctcgcgaccggctgcggcgtcgagtctcctccgcgcgaggggcctgtgcggctccctcctccacccgcgccgcctccgcttctttgttgcgccggtagcagccgcaaagcccggggccgccggtaagcctccaggccccgctcctccttcccctcgcgtgcatggtgctgaaccgctaatatgtgcgatgatatttgcagggacgactggggaggccgaaggtagctgcggcaccggtggaagagctcgcgaaatctctacatggagtggaggtgtttgatctaagaggaaaggcggttcccgttgttgatctgtggaaggacaggaaatttttgtcgtgctttggaagattgattgtgtttgagacgattgatgctggttgtttgcaggtggtgctgtgccgtaagagggccgatcttcttgcggctaagcaggttagtttagtggccgattcctttgtgcgaatttcgaggaacaaagaaaatacatcaaatgctcaaagtgatgcattcttctactctctctatttttttcaatctaccaggttccatttacaaaaacataaaatgttttcattttgaaacttagcagcaccaccaccctcgcagcagctccacgccaccatcgccgtgaccgccaccctcgcacctccgtgcactgccgccaatggttgtgaggaagagaagagcgaacaggggagggagagaagaacgaacaaagtatgggcttggcccatattaccttgtgtgctgacgtggcgagggctgatgtggcaaaaaccacggtaaaaacagcccgggagggggggttaagtgtccggtattgacagtttgagggtgtattacacccggttttgtagttcggaggtgtattttagacaagcataagagttcgagggtgtaaaatggactttttctttttttttatggaggaagtacttgctagaagctacagttctataggcacaaaaccctacccatgcaacagttttttttttcccacagcagtatattgcctccttaccggtgcgttgtgtagtgatggtgcttggcaggctcatgcacagacacacgaaaaaaaaataatcaagcgggcatgtgcagggggaggcttaatacagttcgtcgcgctcgattagttccatctgtaaacggccggcttaaaaattaaaccactttagctacaaagacaaataattaaacaaatttctttctatatatgcaagaatcatttcaaagttctagaactaatacattgatcttccaacaaacttagcccatcgtttagcatacgctgattataagccgtaatggcttatgagcaatcaaaaaataatgtgcgtgcgtgcgtacatgtccttaacgatttaaaagtaaaaattgaaaaataaactacggtttaaaaaagacctaaatcaactctaaaattcagttttaaaattcaaatttaagctgaaagaagaccgattgtttctcaagacaaataggagacaacggctaaaatcatctgcttgagtagtcctcagactctgcataaaatggattaattctgtctgaaaacgccatgaacatcactacatcaaactgagcaaaatggactctctcaaaatacaaaagacccatgaaattacttgaaagttgaaaccaatcaaccatacagcatctagctaggcagctactccatttacgagatggagttcctccaccttctcgggcccttcctcgccgcggcctcgccgccgccgggcggcgccacgccaccaccggccgccgcgtcggcgccggacatcttggccagcctgcccagcttcttccacccgctgctccacgccgacgccgacgtgccctgctgctgctgcttgccgatcttggcggccgccggcgacggcgcgccgccgccgcggccgtccacctgtttctggagcgcgtccatctcgtgctggagctccaggtacttggccttcatgctctccagctcgaacttgagcgtgttgatgtccttcttcgccgccgcccacccctcctggaacgactgcggcgtcccgtccagcagctgccgccgcgtcgtcggcatcgccggcgcggcgtccgcccccggcgccgaagacgacgacctgagcgccgcggaggagctcgccagcgcgttgctgatcttgacctgctcggtgaagagcacctgcaccaccacccgcagcggcagcctctcgttctgcgccgcgtgcatgcacgcgtcgaacgacagcttctggcagtccatcaccctgcacagcctcttcctctcgtgctccgtcagcgtcgggtgcgcctgcaaatcgatcgatcgccattaactccggcgatcaccggaaactagctagctgtaatgtgctagttaccttgaggtaggagtcgacggcgcggtacaggccgtcgtcgcaggcgcgcgccgactccggcagcgactcggcgaggacctggaacttggtgagggagaggttgcggtcgcgggagacctcggagaggtagctgtcgagcagccgggcgacgcgcgccttggcgttcagcccgcccgtcgacgccgacgccgacgccgcggccgcggacgacggcggcatcctcccgctgtagtactccggctgcggcggcggcggagggtcgccgcggccggggctggacgccaccgccatctccgtctgctcctgaaccaggaagtgctcgacgaggcgctgcacgaggtcgacgtcgtaggcggtgtcggcggcgcggccgccgtaggaggggatgaggaggtcggcgagcgccgcctgctcgagctgcatcccgacgcgcttctcgagctcggtgaccagcgccggggcggccctgagcatgatggcgaggcggaggaggcggaggaggaagccgcaggagacgctgtcccgctgcggcggggtgatgctgatgatgctctccaccaccatgcgctgctcgcgcgacggcgcgctgcaggcggcgaggacgtcgtccttgccgccgccggcgccggagatgatcatcatgtggaggccgccgccgccgacgccggcggcggaggcctgcgcccacggctcgtcgtgggtggcgccgagcggggcgtccttggtgaggccggggagccatttcgacgcgtagtgggtgatcgccgcgccgatcaggtcgaaccgcatgcctgtcaaaaaaaaaaacttacgtttttagttgatggaattcttgaaacagttcagctactgtatatgcaccgtgcaaatttgttaatgtctggggtaaatcttttacaattgttagcatgcacttatcttgtgcagttttttttttcaaaataattaactgtagccattatagttttatcgtggatacaccatattttcaaactaatggtctatttacttcatagccacacttttgacagccatagtttattaggttcatgttatggtttgacacattttttttaatagtatgttctacacgtcatatgctcaattttttttgtcaactttgctatattttgtggctagcaatttattgtggctgtcactaccttcttagttgtagtaaagtgtcaccggtaaccaaatacaccctacatttccataggcagtttctgcccgtgcaaaggccattttaggtgcccgtagaaatgttcttttagtagtagatgtttttgcatcctctaatagcagaaatgctcacttgtatacttccaatcgaaatttgaaatttagtgaggttcacatatttatcctgagctttcatggggcctgtgcttgcaaggatgcttgtcgaatcctaattaatccaatttattttggtagggataaattgcatcaggattaattttgatggggaaggctataaaggaactttgtgggaaccccttagattgctgcttaagcaaatcatatgatgcctcactgtttcactattcaagaacacttgtagatatagtttgagttgccatcaaattctattttccctaccggagaatcttttagtgcaagacaaattaatcatgttgtatggtatatataatggaaaatatatgatttgccatgtagttacccaaaattatatatatacttgatcttttgcccactcaaaatgatgtgttagctggagtggacaaggttggcccctaccagtaatctggatatggcttctttaacgtaaagtcagagggacatgtacccataataggtgcaccgccaccgtcataggcccacaagttattgaagcatatccctctgacgtacgttagagaagcctcacccccattaatttacctctttatatctgacggcaattgagagatagcaaaaagagaagccattgctataaggagacggtaccgcggtatcatatcttatccgtcgatccatcgattacacatgatttatcaactaaaaaggctcggtattgttcgaagccacgtccttgcgagagccgcatcaattaagtggaggtcgaagaagcagaagcatgctaataatttgaaggtatctcaagaaattttgcaatcttcgatacccttgacaattttttgaaccagataaaattttagatcacttgatttttttcaattaattgaagtttgtcgtaaactgatttagatttagcaaaaatctctagatatgtacgtccagaatagaactccggtaagaagacagatcgtcttgaatccactcaagtttgggtataaaaaatcctcaccaaaatttacaaaacattttatttccagaaaattttaggttcaaattcagtggaaatcatttcaaaattcaagaagttcgttttgaaaattttcggaaatcccactggctgaaattgtagagaaatgcaggctcaaaaaaagcataaacattgtttgtaatcgtgttgtgttaattacctttgaccttgatggcggtgacgacgcgcacgaagtggtcgatcctgagcacggacacgtcctcgaaccaccagtccgccggcggcaccgcctgcctgctcgggctcgactccttcgactccccccctccgccgccaccgacgttccaccgcgggctcgccgtgccgccagagccgccacctcccctgatcgccgccgggcccccgcgcgctcctccgctgccggcgccggcgccggtgtacgcccagcgcacgccgcgcgggttggcgcacgccttccaggcgatggactcgctgcaccgccgcacgatctgcaggttctccgcccacggcgagagcgcctcgcagctcttgagcacggcgatggagtcgcgccacgacgacagcaccacgtagctgaggaacgcctccgtcttgaagatgaggttcccttcctccatctcctccgtcatctccaggtactcggcggcgcagcgaagcccggagatgttcgccgccgtcaggtccaccgccatcccgtagctgaaccgcgccgccagctcgaacgaccccgcgccacccggcaggtcgcccatctccaccaccgccaccgccgccgccgcgtccgcctccgcctcatctgccgccgacgactcgtacacggcgcggctcatccgcccgctccgggagatcatcggatactgatccatcgtgatcaaccaaattaacaagctaattagtactctctcagtgtctaaatatttgacgcgattaactttttaaaaaatatttgaccgttcgttttattaaaagctttaagtaattgttaattctttttttatcatttgattcattattaattattaattcattattcattattaaccaaaactagtatgtttaagataattactagctagttgcagcatgagtaccaatcaagaaactctcaggattttatttgcgacccaacttgtataccttgtgaaggtagaagttcacgtctcccactttgacgagcagatcgctggggatgtcactgttgacatacctgctcaaaaacgaagcaacaaatttggaacatgtacgaacgcgagattcagcttaattaattaaccactagtaattagtgttactaattaagtacgtaccaagaccggtctctgcggacgaagccgtcgttcttgagcgccgcctcgtgccggcctgagccgccgccgccgccgacggggacgagcccccgctcgccgccgtggctctcgctctccgactcccacatacttctcgccgtctctgagaccttcacttaatttccacgtacttctcgtccttctcctcctgcagatacgccataggtcgccatgaataaatcaacaccatgaatcatgaaacaagcgagcttgtacatacaggcacagatcgacgacgacgacgatcaagaacccaatcgaagaagaagaagaagctgctgctgatgctgctgcctgtactgaactactgactgactgaggtgagcagtgagcactgattggtgggaaactagtagtagctggttagtgagagagctcgggaattgaagggcatatgataaatgatatgaaaggggggaatatccattggtccttgtgatcgatgaggttatgggaaggagacgaccacatgggctgttggcttgtttgtttcggaactgcacagttatacaataaactgcaggctgagtgacagtactggctatgcactgcaagatatagcacaagctttggtttcgatctctcttctctcccgtcgtccttaaagaccaatcccaatggtaatttcatcggagtttcattcaataataaataaagatatcatgcatgtaagttaaatttggtgacatggcaatataacattcacatacatcatgtttgtacaattgtgcagtttgggggctagctagtttcatttcatccaatcacatgcatcgttattagacgttatgaccaacctataaaatcgtgaaataggttacaagatgttttaacttttattaaagtcaaattgtttcaagtttgactaagtttatagacaaatataataatatttatattactaaattagtttcattaaattaatgattaaatatatttttataataaatttatcttgggtcgaaaatattacttttttttctataaatttggttaaactagaagcactttgaatttgaccaaagttaaaacatcttaggagtacattggaggttttattattttctttatcgattcaaaactctctttagatggtatggtacttttggtaaataaaactctccactaagtaccaagttttactactaaatcctctcgacccgttggttgattgatctgctcgatcgatcgctggcctttctttatctcctcccgagaccgaggccaatcccttcgctttcactgtctccccctgcctcgtgcagggagaatgagagatttagcagcttgaaatgagcaccattcgctagctcgtgtgggggctttctatttattttgtctcttccatctacatcgcaatttaagccctatgtgttgtcgcaagcatgtaattaatgccatctatttcttttctttcaaaatacaagacgttaggggtgaaaacggtcatcccgatcgaccgagcgttgtttccgtatatggggtatcgtttccgaccataccgtttttggctatttttaaattttgttttttcataattctttctgcatcatattaatgtcgatattgagtagtttaaatgataaatatggtcaattaccggtcaatcgagcatcatttccgaagagatgccaccgattccgatcgtttccgaccgttttcacccctacaagacgtattagctttttatatggtcctccgacattacactttaatcgtttaattttatttatttgtaatgtactatcaaaattaatatcatatgaaaatatttttaaatatgaatatactgattttacatgcatgatactactagtttaattattaatcagcgcgaaaaacgaatgacatcttacattttataacggagggagtacatcgcacagtgataactcaaacagtaatatcctgattaattagagattagtccagaggttggtagtcgcaaattaacctccccatatgttgaatagtcccacattggttgtggaagggcaaaagacctaagaagtgggggagtctctcacctcaatggctagcttttggggtgggaaaggccctttacggttctacaattggtatcagagcctagctaggttaacatctctggcccgatagacacagtgtgtgaaggcctgatggaccgtgggtgcctgcggggcccgtatacctgatggaccgtgggccggtggggcccgaatacggtgaaggggcggtgaaggggctgagggacatcaatgtgtgaagggggagattgttgaatagtcccacattggttatggaagggcaaatgacctaagatataagtgggggaacccctcacctcaatggctagcttttgaggtggaaaatgtcctttacgatcctaaaccatattgatactacggtcctttatttaattagaaatggccttgtttcttacaaaaactcacatgcataggtgcctgagcagggtacagttagctagtgttatagtagatggcagacgtagtactacgtagctcgctgcacgccattcctccttttgcgggagcccatctgccgatgctatcctctccgtaatatcgctaacatgagtacagcgacaacatattgtttttcctttacccctcttggcctctgctcttcttcagagaaagaaagctctcatacaacgacatgatcgatcgagaatccgagatatggcgaaagaagctgtacgtgtgctgcatatgcctgtgcaatacgtacgtacacatacatatatgctgatgcatcgcagttcatatatagttattgccttattgttgatttggtatggtatggtatggctagcttaatgatcgtgttccacatgccgacgccatgtatggtcatcagccggccactccttatcatgggaaagaagatggccaaggtggggataggtttttgtgtggtcctctccataatcgtgcaagtgaccgatcgatccatccattgttatgcgcatcagccccctgtttgtaagtaactgaaaggggaaaaaaaagaattgctgtttttctatcgaccgaattttagggagagaacttttaaatttgaaaccggtggatttactctgagattcatgcaaaggcgaatcgaacccgtgtgccatacagttcatacgcatatgcctccaccactaaattagtgctcactttgtattactctaaatggttatgtgagaaattttatagttattgagaaaaatatctcgggacacctaaactttatactacaaaatttaatacatcgatatatttagtaactactccctccgttttttttatttgacgtctgagacaagttcgatcaaattaaggaacgggtgaaatgtcctttctgccctccattccttcttccttccaacgcagccgcgccgtccccgccggccaccgcgcgatggcaggcaagcctgcgcctcaacgccgagcgaccagcgagttcgagatcgatctcaacaccctctccaactcccccgcctcagccaccgccgccatttgcaaggccattgatgcgccaagcgttggtgccgcaatggctgccgcgcaactcccggccatatgccaccggagttctgggagcacgatagtttctttctccaacggtagcagctaacaacgcatccatggtcgcgtcgagatcttcaagaagcgcaatctcaccggccacttcctgtcctgctccacctacaaggtgtcaaggtgacgggccgcctctttgtcccctgttctatcgcctatacaggaaaacataagttcagaactttgcgatcagggaaggttcagaacacacataagcagcatggtgtttgagctgcattcacacatcagaattcaattccatggcacacctgctgcacggacagaactgcggagagcgatcaatctagttcttttgcctccttgtcgcctccgacgactttcacaaaccggacgagaaagaatctggtgttctactgcagcttgttcaagatttcctctccatcacaagaatctggtgctgctgccgtggaaccctacctcgggccgccgctgctgagcacgagctcgctgccgaagaacgagaagcggtggcgctgccgcgagacctagccacggggaaggtgcggactgcagtgcgggacagcggcgatgcgggacgtaacaacgatagcggcgcgcgagggcggggaggaggagaaggaggaagcggcggtggaggaggagaaggaggcatcggcggtggacgaggcgtcgccgcgtcggtggcaatggagaaagagtcaggggcaagatggaaattcgggtacgcaagatgggcatctgaatcgccagcgtcaaataaaaaaaacactttcggtttgaactagaacgtcaaataagaaaaaacggagggagtattacactatagtttacaatataattatattatagtcatattctgcgtgcgtacacactctgatggaccactttgcatcctttaagggcacacacatgatcttttttttttaaaaaaagaactcataatttattatatattaaagatagagtttaggggagaagaatcccagttcttcgtcataaccaaagaaggaacttatggaacatacaaagacccatcctcgtagaagataaagctaactgagctaaggcaacaaaaattatccaagtatttactctgtaacggcattgcacctaaagcgttgttcaggcctggactgccgagcgagcgagcgagcgatcgaaaggaggtgcacgcatgcatgtcccctcgatccccggttgacgccacccctgccggcgggtccagacgatatgcgcgctcgccgccggctaaggatccatcggtacggtaaacccacaaatccacttataataagtacagtacaatacaaataaatgggaactgccgccggcagctagcgcgcgcgacgagacgaagtgcgcatcgccggtcaccctggtagacgccatcgtcgaagcaggtttggcgagcgcaacttggagcgttttcagtcatcagctctgttggtcttaacaaccaaatgtcctgttagctagaagcagctagctctgctcgagagtatcctatgtgattgtatgccctaaaagtaggtacaatagcaggctataagagcaggtacaatagcgagctataagccagttataaacatattttaaagagataaaagaagagagagaatagcaaccagatatgtagccagctgcagtacggactccaaaacgtaacgagtgtatgacaggtgggactgggtattaatagtatagtaagcaactattgtatgaattggctattatattggctctagatgatttggagctagtagttggctatactattaaacttgttctaaaccagctgcaaatatattttaagaagagaaatgaggagagagaagagcagcgggctacagatttgtagccagctgtagcacagactcaaagatgcagtgtgtgtatgacagatggaccaggtattaatagtgtagtatataattattgtatgaatgatatattagattgtctataaataaattggagctagtagttgaccatactctaaggtagtgtttggttggtgggatgaggtgggatgggatgggatgaacccactttcaggggtgtttggtttaggggtgagtgggatgagttggtccctagagaggaatattcctctcagatccgggaccaactcatccggccaaaactggcggacaaactcgtcccacctgggacgagcgaacggcgtgacgacgctgctcgcgcgctcaccctgctcgccctcaggagacggcggcgagctcatcgacggcggcggcgacaggctcggcagcggcggtggcgacaggctcgggcgacaacggcagactccacggcggcggtaggcgacaggctcggcagcggcggcgtccgggggctcggcggcgccggatcttgtggtggggaaggcggcggcgccggatctgacaatggggagggctcgggtggcggaagatggctcgagcgacggtggaaggctccagggcggcggatccgacgatggggagggctgcgctgacggaagacggctcgggcgacggtggcgacaagctcggaagtggcggcgtcgaggggctcggcggcactggatcctgtggcggggaaggcggcggcggcggatccgacgatggggagggctgcgccgacggatccggcggcggcccggccgtccgtcgtcgtccccgaagctctcggcgtcgtcgtcgtcgtcgtccgtcgctagcctgtccctctccctctcccgtgcggacctcgccgccatcatcgtcgccgagccatggctgctccgcgcgaaggtcgacgccatcacccgccgcatcgcgtcccttcgcgaccgcagctcggtggcggagatagaggtgagggcagaggcagcggcggccatggttgttgcaaacggcgtcgtcagtggtggcaaacggcgtccatcccatccctccctcgtcccttcaaccaaacaaaaaactgggatcgtcctattctataaaccaaacacgcaagtggaatcatcccaacctcaaaatcatggatggtttcatcccatcccacctagtctcagaaccaaacactacctaataaaactttgatcgtcacccacgaataaccttgctttgtttaaaatggctgacattccgtcgtcgccggcccggcgaaaaaaaataaaaaaaatcagagagctgtactcccacccccccgcgtccccccgccccccccctccccccgcgcgtgtgccacgagcccacgacgtacggtcatttccttcatgggcagtgttcgtgaaggatgaggcccaagtatatcgtggatcaggctgctcctgtgctgggccttgtattagcgagctgcaagtatctatcgatcctgtgaggaataagtccatctcaggttcctaactttgacagagagttcgatttttgtccctgaaccgcaatactagatataacaggtcctcaactatcaaaaccgatttaggcgagatctcttagtggtttagatggtgacaagttagcgcctcctctctctctctctctctctctctcatgtcagcggtggacagcggggccagggcggcgctcgctcttctgcttctttagcgcgggcggacggcggggccaggggtggcgctcagccttctgcttcttcagtgcgggcggacggcagggccaggggtggcactcaaccttccgcttctctagcgcaagtggacggtgtggccaggggcggcactcgggcctccacttctccagtacaggcggacggcggggcctggggcggcgcctcatatcctccttgcgcaatgctatggcagccggcggggccccatatcctccttgcgcaatgttgcagcggacgacagggccaggagcggcgccatcctcttcagcctcctaccttaatgacctcggcaacagcggccgttggggaagcaagaagacagcggccaccgtcatgttcgagcgggatggccggcgaggagggggccacggtggtccgtagcggtgagaggcagttgtggtggaagtcacagatgaggacacgaccacaacggcttgagacggaagaaagcggtggttgcttggtagcaacggcgagatagcagcggtggcgtgcaaagtcgcggtcagcgtcaggcgaaaccacaacatcgatgcgtagtccatccagtcgtacaacgccgacaagtcgcctctgttggtgatgatgaccttagccgcatcaaggccgtggaagtcaccgtgtgaggcggtgtcacactcaccggcggatcccgtcccagcggttgcggggaccacggccacggaggcggcggtaggtacggcggcggagaaggcgaccgtgcatgctacaagtgtggtgaggagggccacatggccaaggactgctccctgggcagcggcaacggcgcgggaggagtacaacggacgatggcctcacccggcacggcctcgacggcatcagcgaggtcaccttctccactttatccgggtagatgagccccgactcgacgtcgcctgcagcgtcagtgttgttgtcgttgtcctccgccaccttgcccctcgcctgtgccaacttgctccagctgccgctgctctgctttggctgccgttcgccctgccccgcccgtcatctgctccggccgccctgccccgatccttttgactagacctagtcaaaaggatccacgaaggcaccacgttagccaaaaccgccatctaaaccaccgagggatctcgtctgaaccggttttgatagttgagggatctgttgtatcgtgtattgcggttcagggataaaaatctaactcgctatcaagttaagggacctcaaatgaacttattccatactgtgatgaatgtcttgatgggctggtaatctataaacacatactcctagatgtcacacaaacccgataatcctcgatgcaaaagatcttttttttttcaatatgagttttttaagtgaactaatgggatgaagataagatttcgagagaatacatggttagggatacatcctctcaaagagcaatacccttctctctacaatttgaaaaaaaaacaatcatctttgccagaggttattataagtacaacaccattgaatcgaatatctcttttaggtgggtaattgttggaacctggtgaaattcatgtataatgcgatcatgaactctaatgtgaggatccgcaagatcttatgtaagctaaatataccactaaaaagtcttttttttaaagaaagtaatgataacaaaatataagcttgctaaaaaaatggaggaaagcatcgttgcttttccataaaaatatttaaaataagattggagatgtgtaaaccatttaaaatgaattcactgcttgcttcgatttgttaatagtgggaaatcgtgtgaaatataatcttgtgaaagggcatgtagcctattaacacccaagatgctagttctctgtttgatagactaagttcctaattgaaaaaaaggctgcacatatccgattggatataaaggccgggtaaaaaatacccttctctaacaaaaagtaaaaaaaaaatagtgagaaatcgaatctgtagccgcaaggttggaaacaagtcttgcactctagtcggagatagggaaaatgcccttctcaaaaaaaaaaaaaaagatagtgggaaatcgtatctgtggccgcaaggttggaacgaactcttgcactctggccggagatagggaggagtagctagtatacagtacaaactactcgaagcacagagtacgactacgacctggtctggctaggactttctgagtcttgtctttgtcttgtgtgtgtggatgcgcgcagctccaaatcgatctccaattacgctacgggggaaattaaagaaacagaaaattaatcttctcctggctgatttcaattaactctcaccattcaactggcgtatctaagctgttcgctaacttttgaatgaatattcagaaatataattcaataacttttatgatcttgttatgccgtgtgagtttttattagtttatgtatgcttttgtttattgaggtgtgagtttttatgaattggtgtaataattgactgtaactctctaagcaaaagccatgattatatttcattatataaaaaaaaaactggcgtatctctttacatgcatgatgagacttctaagcgccgtccctctcgtcgttttcttgaccggatgaatctcctctcttgactttgacctgtcaagaggttagttgacttgaaatcaaatacaatatgtttctctatcaaatccttgaaacaattataatcacgatttttttcagccacataaccacagtaaatatctgtttttcatctggctaaagaacatatttcttgtggttataaatatttagcctttcgggtaatattacttgactagctcatctggttaggtttttaataatagaacctgcctatcgcgcttcaaatattagaattgacacgtgtgttcacatttatagctattcactattttagtggtaagtgagtaaactctaagatatatatgggctacaagagagtaaccgaagagacaaacaaaataactcgaggcttacaaactgtcatggttatggataccacatacctaatagtagttgactaaatctcggcaggatccaccacataccatgtcttatacggaaactgacctcgagggagttccggataagaaaagacaaccagagttatacatggaaatgacaaggactactcggattgtattcatattggtttccccagttctacttggacaaggggacacctatgtgtataaatacaagaccccctaggaggacagggggacaccccaccacgagacaatcaactcccaacacaatcaacatacaagcctacatatgccaagacatgtcgccggatatcgacttcagggataggcatggctattcccctacggtgcctccggataccgtcaggagatacgaaagcgctatctctgatctcgccggacacggattcgaggaagaaggctaccctgttgtcgactacgagttagaccttcagaccgccatgtcgacaacagttagatagactaccccacatattgtactggtgtgattatggtgaataaagagcaacatcggctccggccaacaggatgtagggttattacctgaccactcaggggcccgaacctgtataaaaatccctgtctccgtctcttttacctcagtctcgcgtatatcctagcactaacgatccccatactgtccaaataccgtagtcgagacatcaaacgtcgacacaaaccatggagtataaacatccgctccagcttataaagcacagttctttggtttagtcaagtcaaattatgacaatttgatatggaagccttagggcccatgcaaatgcaagtccttttggttggctatgtgaaatataatttggaccatagacagactggcagcccgtggctggccaaacaacacatattgtccgttgtgacaatatgccttcgaaatatcctttccaccttcatttggaatacagataaacgaaaaagatatgggacatgattgcggactgggttacatgtgaaccactaaaaccggcttcttgaaaggtaccgagcacatttcacaagtggtgagaggccctagcatgatgccaaggagcaccaaagaaggaaacatgaactctgttactaataacatgggagatatggaaagagagtaaccaaagagtctttctacaaatagaactctcgatggtgctagcaaaaagttaaggaggaagaaaaaacctaggcccttacgggtgtatagcggtttgcggagctctaccttggatcttccccgcttatcccttgtgtaattgtgatatcctctatacatgtaaataccctttactcttatactcgatgaaattggcatacctagtaccgattcattgaaaaacgtatattaagatataacggtttcataggaatagtaggttgtgagtgtgtattcatagagtaagtgtgtgtatgtgtattaatttgagcgtccatgttcgtgttgtattttggaaaaagttcttaagtatttagttttcaacaaatgtttgcatattgcttttaaaaaaagtattataaagccatcataaatttattagattatctttaataagcaaattttttaaagaaactttaataaaatatttataggagggatcaataacatacttcatctatcttcatagcaatcttatatccgatcagacataattcagcacaaagaatatattgtgtctaattcagcacaaaattactatattctgagacggagcaagtaccatatatagaggtataaaatacactttcacagttgcacgcacattcgccgcccaacatacaccgatgaaatgaccctggtgggctggggtctggtcggcgcagtcgtccttacgtgctcgatgtgtgcccacgaccacgagagctatagtgtgtgagtcacgcgccgtgacaatttttttcctcccttgaccaagctgtagccaccgggggcgtacgtgccgtgccgtgtagtgcgcgcggtagtctactcgcacgcacgcagccagtcgatcggcccccgtttttctccctcgctgacctcagacactaccgcctagcttgctctcatctgttgctttgccctccagttcaccagttgctgaatatatatatatatatatacctgctgctcaacgcagtccctagctagtagctagccaattctctcgatcgatcgcccatggagcttcttgtcgccggcggcggcggcggcggcgccgtctgctgcatgtgcggcgaccacggcctgccgcgggagctgttccgctgcggccactgccaccaccgcctccaacacaggtaccgaactactactgatcgatctcgatctctcccctgatcgacaagcatctttgatcgaatatatatatatatatatatatgtgtgtgtgtgtgtgtgtgtgtgtgtgtgtgtgtgtgtgtgtttatgtcgatctgtgctgtacgtgtagatactgcagcgagctgtacccgagggtggcggcgtaccggcggtgcaactggtgcctgagggagggacgaaggagaggcggcggcggagggggctccccggcgacggcgacggcggcggcgaaacggaggatgtctgcggcgttggagacgtcgaccggtgattctaataaggtggacaagagtagtaggcgtggcggcggcggcggttgctcgaggtcggccttctgcgcggagcctggcaagccggtgaagaagcccaaggccgccgccagcgacgacgacgacggcgaccgggtggtggtgatgccagtggatgagacggcggcaacggcgacggcgacggcgttggagaggaagccgccggcgaggaaggcgcggttcagggtgaaagtgagacggtacaagctcttggccgaggtgctcagctgctagtattattacacccacgagccggtgaacggtgttacagggcctctcatgaattaagctacagtgttactatattataatctagtcaacgcaatctgtagataaatatatactccctccgtttttaaatatttgacgccgttaacttttttaaatatgtttgaccattcgtcttattaaaaaaatcaagtaattattactttttttcctatcatttgttttattgttaaatatattttcatgtatacatataattttgtatatttcacaaaatttcctgaattaaacgaacggccaaacatgtgctaaaaaatcaacggtgtcaaacatttagaaacaaagcgagtagtaaattataatacaagaactacagggtactactactgctggagtggagtattccctagatgatccatctaagaaaaagctaaccggatgagacaccatctactacaataaatctggatatgcttatatccagattcgctaacttacgtggtgttttatccatatttagattgatttttttgtgggatagagggatatctcttaccactgaactaattagtgtgtgagcgtggtgagcgtggtttgtggtgcgtgtagacaaaagtcaaaactaacgacggcgttcaacgtccatgcttgacttggtcccaatcagctcttgctcctgttcctttcttcatgtgggctaatggtcgtaatcgttcgtgaggcccatatttcacgcaggccggccaggaaacgctgggctgcctccttcccccatccgcatgcctccttcgcggtggcggcccaacaactttgtggaattacgtgcggaacgcgtcgaccgcgaggaagaaagtggaaaacggattcggatttgcacgtctcgccgcctagcgcgctagcacggcagcacggcagcacggcgcgagcaagaacgggccaccacagcaagtcagcaacgctattttttttaattctttttatttttacaattctttaatgaaaatattgaaaaaataattttcgttttgaaaaatacaaatctagccgcatcacgttctcaggagtttttttttttttaaattcacctttctaaagggctttaaggaacctaaatgtaaatatttcagtatagtcttattaactttatgactttgcaattttaaaatatatcatataaagtcagttgaaatcaaaatttatataaaaattgtagagctcgacgggatctacaactttgcagttaacaaaaatttcacttaaaattgtttatgtgtccaaatatttgttacaaaatctaaattctattttaacaaaatctcatatctacatttcaaacgatatcgaatggagacaaactttatgtgcagcacacatgcaatgttttaaatagcgggctaagacatttagctgttagcttttcaaagagctatagcggttaaattgtacataagagcaaatagttagaacacttctcaaacagctatagtgggagatttaaaaccctgcatacaggtagcaaacaaggatggcacaacacatgtctgatcaatgtaataacaagtcttacacattgagtggctcatgcacttcctaatataagtatgttacaatctcaatgtgagaaaattttaatgtcttacacattgagtggctcatgcacttcctaatataagtatgttacaatctcattaatgtgagaaaattttaatgttgcatttgtacgagacaactgtgaacagaagaatacaacacatcctctctactgctaggaaaaaaaacaccccagagaaacctcacaaacaaaagtaggtttacatgtacaacacacagataagtagataaccaaacaaagtatatgacacaacacacgtacgtctgaaacaatctaacaagccaggcctcacacattgagcgcactggtggagaaaccctttgtagtcccggttcgtaacccccctttagtcccggtttccaaaccgggagtaccaatccgggactaaagatcgctatctttagtcccgggtgaaataaccgggagtaaagatcgatctgtagtctcagttggccacgtggccggctgagccatctttagtcccggttggtgttaccaaccgggactaaagatcgatctgaccttttttttttttgcatggccctgttgctgcatggtttatatatatatatatatatatatatatatatatatatatatatatatatatatatatatatataaaccatgcatatatatgtttcaatacatatatatgcatacatatatatatgtatatatatatatatatattatattatattatatgtatatacatgcataatatatatgtatttatacatatatatgttatgcaaatgcatatgtatatagatatatatatgaccaaaatatatttacattatagaaaatgtgtacacatgcatatagaaacatatgtagtcatgtattaattacaatccattatatgtcctagctagctacgatttcgacgtagtagtactcgctgctagctcagaagctaaggaccggtgaattgtgtttccgtcgtagtagaattcacccttgggatcaaggatttcttcgttgatgaatcccatgagttgttcttgaaccgccgtgataaattccttgtgtgtggtcaggttatccctcatgcgaataaactatatgaatgtatgaaattgattagtaattaaacaagaaatcgctacgtaatgaaattttgaatttatttgtacgtacatcgagctctcttgtggtgatgatttggtttgcaaggcagtggcaatactcgcacacgtaatagccgcacaagttatttccctgcttttgctttgcgcactacaaataaatgacaaacaacgagagatctaattaatatacacttgtatgtatttgaatcggagaaatataaatgtagagcatgtgtactcacaggaaatttgaacttccgcctaagtctttctctccatttgccgcggaccaaatgacggaaccgataccaagccctacatggagtttaaagctatgattcgtagtagcaattaacataacaagattttcttaattaacaaaggaacttatgacggtacctgtctataagttcgaaaaccttgtcaaacgtagactcttttttatccattgagtcatatacgttgacggtgcaggcctccaggtcgaagagtaaaagcacccagtggaatctgcaatgtgcgtgggatgcattacatatgaaacacttagcaagttcgtacgggaatgaaatttggtatgtaggaagacagtaaaattaaactaactctgtgttgtatggcaacagtatgaacgtcttgtaatgctgcgccttcaggagatggacgagattgtcctctgtttcttgtggatattggtcgagcattgcgacgtttactttccgagggtcgatgaatccagtatcgaaaaccctccgccgtcgggccctttgaatctccattctacaacgataaaagggagtatattattttctatagtctacttatatacaaggacctaattaattaaaggagacgtatagtaagaaatctaactgaacgatatacttacaaaatccagcaactcataatagagacgtcgagggcgtccagctggtatagttcgtagattcccctgaaattgatccagagaatgtcatctccttgcaagaagtccgtgtccctgatcctcgctccgatcatctctctaccggtggcgctcatctccatgtacagctgatggaacttgtacatttgtgtgggtagggactgcagcagctcaggcttgacaagcggtttaccgagttcgtacatgtatttcacttccgccttttcgattggtgcgactcctagcaattgatccgtagttagaccggtgtcagtaataaattgttctatcgtcatttctttaccggtcaccaacggctcgatctcctggtttggttactctccaagctgagggactggtttggactttctagaagatgctttcttcagcgttcgctcatagtccgatagcttgatggcctccttgacagatgcagacatacccctgaagaagttcctgacactggggtctataggaatcttcttttctggacttcgaggcttgaattgtctcttgacttctgatgcaacgttagcgtcaagctcctcttgcgtgcaatcgtaccccgggtccttgttcttggcggcgtcaactttcgccttcttcgttgcccttgtgtgggcaggcggtggagctgggggggcccttgactttgaaggtgccggaagaggagcttgcgggggagtaggtgtaggagcacgaggaggagtcggtgcaggatcctgaggaggagtcgatgctggagcctgaggtggagacggtgctggcggagcatgaggaggagacggtgcaggatcctgaggaggagatggcggagccggaggagatggtgcacgagacgccgcttgtcgcccagggaggatgatgtaccgcctgcgccatagaataatggcatggcttgtgtctcgtagatgcgtctcaccgtctcctccagggtaatccagctcgaggtcctcgtacgcgccttcgaccaactcaatttcgaccttcgagtatcctgctggaatcggcctgcagtggtaagtacctgaagggtccgttgggatggccatgcccgacgccaccttcatgttgtgagagattatttattagtaatcaacatatataagcagcaactagcggaatggctaaatcttacctttattgataagttcttgaagggaatatgcagctcacatggtgtccgctgagtgatgtcatcaacgggacaggtcgattcgtcctgtgtttgcatggcgtccatgctctgtgatcctacctgccccgttgaggcgcagctgctacggtttcctgacgggctcaccattgcaggaggaatggtcggctggggatcatgggaccgatgtgcggccatgcgttcatcaaccttccttgccacctcctcttgcatgttgagttcgtagctcgatacccggaactctaggtctgcaatcttcgcctcggtatctctcttgctcctcatccgactcctgtacgtgtggatgtcctccttgaaaccaatcttccaaggaatcacccctttccctcgtgttcgtcctggatgctctggagtctgcagggcgagtgtcagctcgtccctatctctgtctggtcggaacgtgccctgagaggaggcttccactgtatctgttagtcgtcgcgcagcctctcgtatctgatcgccgaagaccagtgagccatcagctgggttgagcgttccaccgtgagcatagtaccagaactttgatcgttccggccaattggctgttgccggttcgatacccctctcaatcaagctagcctccatctgctcccacttcggcatcgcgacgctatagcctcctgaccccaagtggtgatggtacttcttcttggcggcattttctttgtttctttccatcatcgcctgcccttgttcacctgtcttataagcaacgaactcgtcccagtgatcccttagctttgggaatgtgtcgaagttcggtgtctgccccttcagtatatacttctggtacagatctcccttgaagctctgaaactgttctgccattttcttcagagtccaccttttcactttgtcctctgtacccgcaggaagggtgaatgtctcgagcattgtggtccacagcatctctttctccgaatctgggacaaagctctcatgatctccgcgtgcccttgttcttcgccagtacaccgtactgacaggcacgttatcccgcacaacccaaccgctgtgacgtacatagttcttggcggcttcggccggggcactaggacgtccatcttcttgcacttccgttatgatgtgccgaccctcaagcttcttcgctgcacctcgttgcccgtgtgccctcttctgtccaacggagggttgactaccactagcctcctcctcctggttcccctccacatccctttccacgtgcccctgctggttcccctccgcatccctctccacgtttccttcctcgttcaagtactggtttggatcctcgttcccctcttcttcattccagtactggctgcttccctccgcgattgtatcgtacaatatctgttcctcatcgcggtcagccatctgttgatacaagaaacatctgctatgtcacgagacatttatgttttaacaatctaagtcatgtatgctaagtgtaaatgtcgtacattagaaccctacacaaccttacgtgctaagtctaattacaaatcgtgatataagttaagtctaggtgacgtatattatacaaccctagctagtaaataattatatactaagtctaattacaaataaaataatcttatattaaaactcaaataatattacatgctaagactacaatagtcatgtatatgctaagtgtttcgtgcgtatatgctaagtctaattaagactacaatagtcaattgctacttgtcgcaccaattccgtagtcaataattacatactaagtctaattacaaataaagtaatcttatattaaaactcaaataatattacatgctaagactaaaatagtcatgtatatgctaagtgtttcgtgcgtatatgctaagtctaattaagactacaatagtcaattgctacttgtcgcaccaattccgtagtcaataattacatactaagtctaattacaaataaagtaatcttatattaaaactcaaataatattacatgctaagactaaaatagtcatctatgctaagtgtttcgtgcgtatatgctaagtctaattaagactacaatagtcaattgctacttgtcgcaccaattccgtagtcaataattatacatactaagtctaattacaaataaagtaatcttatattaaaactcaaataatattagaacactacacaatcttatatgataagtccaattacaggtctaataatcttaattaattgcattacaaatataacaatcatttatattattacgtcacttgcctgctccaattccttctagggctagctcttccactcaggcttgacggacgactccgacaacacgtcttttctgcaagatacaaaaagatgtattaggataaatgcgaagtaacatatatatatatatatatatatatatatatatatatatatatatatatatatatatatatatatatatatatattgcatttcacgttaacgttcgtcctcgttcgttcgctcgttcacgttccctagctcgttcacgttcgttccctcgttctcgcttgtcttcgatcgatcgttctcgttctcgctctcgttcattcgatcgttctcgttctcgttcacgttctcgcggcaacgtacattgacgtgttcgttctcgctctcgttcgttcgatcgttctcgttctcgttcgttaacggcggtgtggcggcatcggggcggcggttggcgcggcggcgtggcggcggcggcggcggcgtggcgacggcggcggcggcgtggcgttgcggggccgtggcggcggcggcgtggcgtggcggcggcggcgtggcgtggcgtggcggcggcggcgtggcgtggcggcggcggcattgcgcgcgcggcggcgaaggcggcggcggcgtggcgacggcggcggcggcgtggcgttggcatgcggcggcggcgaaggcggcggcgtggcacgtcgtcgtcgtggcgcgtcgtcgtcgtggcgcggcgtctcgtggcgggcggcgcgacggagagagatcgatatcggagagatcgagatgcatgaagggagatctggcggcggcggctctcaccccagagatgcggcggcagtggaggaggcggaggctgcggcgaggacgacgagctcgagacgacggcgagatacggcggcgtcggcgcggggatttgccctaggcagtggcggcgaaggagagaggccgagagagatcgatcggccgaaaacgtctaagtgttggtgaagaagacgagggcgcaccgggaatatatataaccccggatttttactcccggttgttgagaacaaccgggactaaatatatctttagtcccggttgttgagaacaaccgggagtaaagaaaagatctttactcccggttgttgagaacaaccgggactaaatctttagtcccggttgttgagaacaaccgggagtaaataaaacatatttactcccggttgttctcaacaaccgggactaaagatgatcgttagtcccggttggtattaccaaccgggagtaaatatcttttcccgctatttcgaaattctttttaaacccggttagggttaagaaccgggactaaagattatagcactgcatatgattttcgcttacatatgtgtttataaaatagaagttaatgcattaacattatttaaagtacaaagattaatgacaattacttcgaaaaattatttttgtctgtaataaattaagtggataaatcgtaataagcaaatatatgacttataattaataaaaattccaatatatatatatatatacttagcatatatatgaatgatattattatattggtaaaaactctaattaagatatgtatgtacatactgcatgatttaaaattaataaaaattgtaatcatcatatatacttagcgtaggaattatattaaattaaatgctaaaaactctaattaacatatgtaaatgccacatgcatgatttaaaccttttaaaaattcgaatagtcatatataagtagcatatgaaagatagtaaattaaattgtgaaaaactctaatatatgaatgatagttttaaaaatatattaaatttaatacttttaaaaattctccagtcaattataatttgcatatgaatgatagtaaattaaatgttaaaaactctaattaacatatgaaattgccacttgcgtgatttaaaacttttaaaaatcctctagtcaattataattagcatatgaatgctagtaaattaaatgttaaaaactctaattaacatacatatgaaattgccacctgtgtgatttaaaacttttaaaaattgtaagtatcacatataactagcatatacatgatttaaacttgttgaaacctctaataatcgtgcgtaattaacatatgccatacatcaattgatttatatggataatcaatacatccaaaatagtttacatcgtgtacacaataattacggcattacatcggcggtgacggttgaccgcacgtactttctcctcactattgttccctccttgtgatcgctgcgtgagtaaggggtgtcttcatttgataggaggatgctagggtcaatcgtcaccgtgaaagggggttgcccatccaactgatcgtaatcctcgtcagtcttgtcctcaactccgacgatttttcttttgcctgggagaaccacttgacgcttaggctcattaggccctctgtccttctttcctttgctagacatgtccttcacgaaaaagacttgcgttacatcattggcaaggacaaaaggttcgtccgagtatccaaccttgttaaggtcaacagttgtcatcccactgtcatcaatcattacgcctccaccagtcaacctaacccattggcaccggaacagaggaaccttgagaggaccatagtcaagttcccatatgtcctcgatggcaccgtaatacgtggcagttgttccatcgtgtcccctggcatcgacacgaacagcgctgttttggttcgtgctcttcatgtcttgggctctcgtgtagaatgtgtacccattgatctcatatccctggaatgtcgtgatcgacccagacggtcccctcgccaggaaggcaagttgttggttgatcgactcgttacccatgagatgttgtcgtagccacgcggggaaagtatcaatgtgatgccgtgtaatccatgcatcggacttaccgatgttcctggcgcgaactagagccaagtgctcctcgatgtaaggagctaccaatgaagagtgttgcagaacagtgaaatgggctttacggaataaattgttttctaccgtcattattgctttccttccgagagttccctttccccgtagtctcccttcatggcgtgattcaggtaccccgattgggcgaaggtcttcgataaattctacgcaaaattcgatgacctcctctgttccataacccttggcgatgcttgcctctggacgagcacggttacgaacatacttcttcagaacgcccatgtacctctcgaaaggaaacatgttgtgtaggtacataggcccgagaatacggatctctttcacaaggtgacaaagcagatgcgtcattatattgaaaaatgaaggtggaaatatcaactcaaaactgacgagacattgcaccacttcattctgaagggcttctaatctatccggatcgatgaccttctgcgaaattgcgttcatgaatgcacatagctttgttattgttgcccggacattgtctggaaggataccccttattacaactggtagcagttgtgtcatcaacacgtgacagtcatgagactttaggtttgtgaacttcttctccttcgtgcttattattcgcttgatattcgtggagtatccagacggtacctttatgctctccaagcattcaaacatactttccttctctgccttgctaagagtgtagctggctggactcaagtaatggcttcctttctcctttggttccgggtgaaggtcgccgcgttgttccatatgcttcagatcattacgtgcttccagtgtatctttcgactttccgtatacacctaggaagccaagaaggtttacgcaaaggttcttagtgaggtgcatcacgtcgattgcgtggcgtacgtccaagaatttccaatatggtaactcccaaaatatagagttctttttccacatcgccgcgtgaccatcttcgctctctatatgctggcttccaggcccctttccgaacactactttaagatctttaaccatagcaaacactgttttcccgctgcgatgtttaggcttcgtacggtggtcggccttatgttcgaagtgcttgcctttcttccgtaccgggtggtttgctgcaaggaatcgacgatgacccatgtatacaaccttcctacagtgcttaagatacgtactttctgtttcatccatacagtgagtgcaagccttgtaccccttgttggactgtccggataggttgctaagtgcaggccaatcgttgatggttacgaacagcagcgctcgtaggttaaactcctcctgtttgtcctcgtcccacacggggacaccttccttcttccacaactgtttaagatcttctaccagtggtcttaggtacacgtcgatgtcgttaccaggttgcttggggccttgaataataatcggcatcattatgtacttcctcttcatgcatagccaggggggaggttgtagatacacatcgtaacgggccaagtgctatggccgctgctcatctctccaaaaggattcatgccatccgtactcaaaccaaaccgtatgtttcgtgcgtcctttccaaattctttaaattttctgtcgatgtttcgccattgcgaaccatcggcggggtgtctcagcatcccgtcctgttgacgctcttcagcgtgccatcgtaacattctagcattccccttgttcctgaacaaacgccttagccgtggtattatagggaaataccacatcaccttagcaggaattctcttctttgttagctgcccgtcaacttctcttggatcgtcccgtctaatcttgtatcgtagtgctttgcaaacagggcatgcttctaggttctcatactcctcaccgcgatataggatacaatcgttcggacatgcgtgaatcttatgaacttccagtcctaacgggcagactatcttcttagcctcgtacgttgtctcgggcaatttgtttccccccggaagaatgttcttgatgagtttcaataaatcgccaaatgccttgtcactaaccccattttttgccttccattgcaacaactccagagtggtatccaactttttgtgcccctgctcgcaacctgggtacaacgaagttctgtggtcctccaacatcttgtccaatttatgggcctcattttcactttcgcagtcctccctggcgtcctgcaacatctgaccaagatcatccgcaacgtcgttaccatcagcagctatttcctcctcgcccgtttgatttccttcaaatccaacatactgagcaaagtccggaatattgtcgtcttccacttcatcttcttccatttcaacaccttgctctccgtgggatgtccaacaattatagcttggcatgaaccccgactcaaacaagtggaaatgaatagtcctggatgcagaatactccttctgattcttacacttattgcatggacaacaaataaaacccctttgcctgttagcttcggccactctcaaaaaatagtgcacgccgtcaataaactctttggaccgccggtcagcgtacatccattgccgatccatctacatgagtcaaaaaaaccgtacacaaataattattcttacaataatgacagtcatacaataattataagatatctttattcatacaaaaatcataaaatattacaccaaataattcttaaaaactatttgtaaagttttaaactaattttaatgtgttttacttcttttaattttcattttagtttgttttctattatttaagattaactttcactagagttttccttctcaactattttataaaaccttgtttagcaaatgaactaaatttctatatattctttcttccccacacacattttctctctcatcaacttacaactaaattttggagacaaaaaaagtgtgcaaaacataggtgcaaatgtagtatgacaaaaaataaacattggaggatgaagttgcaaaccttttaggcacctccgatttgtatgtaatcaccaaaataaattcaatagaaattttggcatgacctcccctcttttttgaagaaattttgaagcttgctcgggcagctggaggaggaagaagacatatatataggggtgggactttagtcccggttggttaccaaccggggctaaagatcaccgggatctttagtcccggttgggcctgacaggccctgacagcattcgaaccgggactaaagatgatctttaatcccggttggtaacacaaaccgggactaaagatcaaatatgcccgttacccttttgaaccgggactaaagatcatctttagccccggtttttattgcaaccgggactattgtggaaatcggccgaccgacgaaagatgttttctccaccagtggcgggtcatgcaccacagcactcgccgctcctaacatctcctccagcgagcaataaccattggcctgcaaataggtcaggttcgccaccttgcacatgttccaaaacagatccttgcacggcctagggacaccaccgccgccggcggcggtaataaccagcctcagcagctccctcttggaggcctccacggtccgccgtatctcctccttcgccatgtccaccgacgacgccgagtgcaggtgcagcagcaggacgctgttggcgatcttgccgtcgccgctctccctcccgtacgacgccatgtcattgaggaggcggcagcacacgttggtgagccgcatcaggccgccgtactcggggcccctgaccacctcctcggggaggagctccggccccatcaggtacagcgacgtggggacgatgggccccagcgcgaacgacacctccgccaccggcatgtactcctccatggacggcacgtgcccctctctgctccactccgcctccttcatcatcgctctcgccgtgtccagccactgcattcattcattcattttgcaagcaacagcttaattggttaatcattagagaaaagtcgatctgatcattaattaattgatccatatatgcagcatcaaggaacatgtgccttacaagttgggcaatgtggctgatgacgctgcgattttgcacctctgcagccctttctccgatcttgttgctcgtgttatacaccgcgtagaacacggtctccacatcctcggagcaaaacccgatttcgttgtgcgcatcccacctgcatatcacgccgcgatggcattaatttgctgatcatgtcatgtgttttgattaatttccagtgtaagtatatattaagagccatcggggaagattattacttttcgaataatgcgatgagattttgtagctcttcgctcgatcccgcgacatcgaacaagtcatcgactgcggttgtcagcagacagttctggatccatgcaatgcgggcatccgataattcacgaggtaacacagatgaagcgaggaagaagaacacatccaatggcagtatccttagaaacttgagctggtccagccgaacctctttcacccatcttttgccaacaacaagttgcatacaacttaaaattagaatctgaacaaagtatcttcttcgcttgaatatatatagacaataacagggatgtgatagttgtatttacctatcaacatactgaagttcttgccggtaaagggattgggcagaatggaattctgcaacggccaatgctataatatcttcagcgatgtggtgcggcctgaataatatttcattacaatttcttttctaagaatatataggaatgaagtgtgcaattattaaaaggtcacactgctttgtaagactagtcaccagcctgtgcattggatgaacaattattgttgttattgtgataacaaaacttttaatgatatgctatgtgtgtgtgtgtgtgtgttccttattattcgaattatatatattgcggcttagacaaagaataatttgttattaattttgaattttggaattaaatcaattgccaaatgttttctggttaacgtgcatggaaactttttatctcaaagtgccaaaatggtctaggcgcagatagatggatctcttacagaaatgctgattttcgcatttgaatcccgttggtgctaaaatgttcgatgttcctcttgtgttctaatggttccaaaacagaagagtagaatggaagttgaagagcacattccacctgaaagtatataggaaatgctgagacgacatatacacgattattatgggaatctgaaagcgaataaacataattcagttactgttgttacctcctggggcattactgatgttgatattttgttggaacataattgctgccttagtagttcagttgtccaagagtcaattttatccaaagtccactcatcatcaaagattcgtacctttgaagctttatacaattcaagtatagctttggtatcattcagactgccctggacgactgaatcagggaatctggattcttcagaaaagtgagctaacacatctgcaccaaagtttaagctggttggttagttagcaaattagtgttagcaaagctctcgccataagggcaaagtgctatggtagatgtgactaccaccttcaaatttatccatatcattcattcataaattaaaaggcaactcatacaatatgtcacatctaatacacaaatacaaatgtctctaatactctcacactcttcttgaaatttgtgtggaggttgcctcttaatttaggggtggctcatcatctctctcctcacttctctcttccacctcatcatttaatccaatgtggcacttttaggggcagcatatggagcattatagtacttgccgtaacgaactaaacccgtacaggtaatacccgatgaaacgtcatatccatgcatacgcaggatgcgaaatgccattgcacatgtctccatgtccatgatcatctcctcgtccttttgcagccataacctgcaataatttgaacctgtgaggataaatgaaagaaaaaaaaaagccaagtagctaggaacacgcgaggatatatatgtgatctgcaagggctgttacttgtacgccatgtccaggattcttgttatctcgcgagagaaatgacgagaaattccaaccttttcaagagtatctaccaggaatagtttggaatatgtctttgaaactgcaaattaaatgaaaattggattcagcattagatgcacacactggtggatatcagactctgtttcctactcctgatcagccacgttttctctagataaaacgaagactcaccttctgacatcgacaacctgagtgtttctctgacggtgtttatcctgtctgtcttttctcttacttctccatcattcaggtacaccatcttgatcatttaatttcattaagattcaatacgcttatcagtatgcgactatgcgtgaataagagatgaatgttttaacagtgcatgtgtttgtagctttatatttgtatgttttatgcacgtaccttctgtcgcctgtattcatcaagtggctgtttgcttgtatctatcccccgtgtgttgctgtgtaccttgcaccctgaaagaaaagatttgaacatttcgaattcagaaaatgtcattcaattaactcattgagcaggttagttaatatgtggattcatgcaccctgaccgcaccctgaccgcgtaataagtttaagcacgcgtcaaaggggtacactctcgcttacagcatttctattggtgaaatttcatggttctcaaaagatatctataggtgttaaaattttatactcctatatgaagatactaagttttataatagaaaatatgatattctttaaagaatgctaaaatcactctctttctaatgtgttataggaggatctgttgatatagtgcctaaggatgaccgtgtcacatagaaactagggtacacataactataacaacgcatattgtttctactatttaattcataaacatattcaatatatcacatttttcttgttttcctctccaatctctatgcatgaaaacacgtccctaatatgacatcacctcatcatatcacattctagggtatagactggtagactatgttgttaatttcttgcttggtggtcctctcatcaatgcgatgatgtctaatacgttcaaaaaaaaaacttatctaggaatggaagtggacaaaggaatagtacgtactagaagggataattaatttatttttaggacgcgactacgcgtcagtcatccgacggggagagagggaaatcgggcactgacgtcatgataacgtcagcacccgatttacgtgcaaaactactttaaactgatttttcttttaaattatttatccaaatcatgatccgattgcaccgttaaattcgttgcaattaaatcttcaaaacaagaccacacatggatatattccgacaaagaaaaatttagcttattattgaattttttttaaatgttgcacgatgttccaccaagtatatcgaaattgtttcattaagtaggtcgaaaatgtttgaatcgtttaaatcgggcgttgtttcaccttataaaaaacaacgtttcagtaaatagcgaaagaatgttttagtttactgctacattagatctatacatagtgaaacattgtgagtacactaggtgaaacatttttggtggaacaaaaaataaaccaaattctcttaatagagagtttctaaaatatgtgggtgatttattgcaatggagtatttcagttcgctgcaacattacatctatatatagtgaaacactgtgaatgcactagatgaaacatgtttggtggaaaaaaaataaaccaaattcccgtagtagagggttttaaaaatatgtgggtgagttgttgcaacggcgtgttctataatatcaaaatccactgcaacatttgatccgtatatagtgaaacatcatgagtacactagctgagggtgtgtttaattcctaaaaaaagttagaagtttgaagaaaattgggagtttggaaaaaagttggaagtttatgtgtgtagaaaagtttttgatgtgatatgatgtgatagaaagttgggaataggagagaaagtaaacacggcctgaaacattgtaaaactactggttgaaacatcaaaaaacaccatatgcaacattaaaaaaatcaataaaaaaactaaaatatttttttgtcgaaatataatcatgtgtggtcttgttgtaaagatttagttataatgaatttagtggtacaatcagatcgtagattagataaatagtttaagagaaaaaatattttgaaggaatgaaagatggaagtatggaagaaaagattctctgcatgcatgcagtggcaggcacacagtccgattttcctctcctcccatcagacgtccgacagacaacatttcctttatttttatggagagagtaatacgcgaaaaactactttttcttttttgtcttatccattataatgcgacgtcaaattaattaatttcatcccgacttgacaagctattgccatggtactgcttttagggtttaggagtgctattggagcaggtataatagcagactattagccagatataaatatattttaataagataaacgatgagagagaagagcagcgggctacagatctgtagccagctgcaacacggaatccaagacgcaatgtgtgtatgacaagtgggaccatatattagtagtatagtaagcaactattatatatattagctattagattagttataaatgaattagagctagtaatggactagtactattaaacttgctcttagagcaggtacaatatgtaacgccccgacattcgttagccataaacacagctaactcacatcagggtgttatgcattacctgtgatatagtaccagtctcaggatacactagctggtacacacagaataaatgtggaatcaaaataaactgctttattgcatcactgggtagtagtccttacataagttgctatcatggacaggcccatagatgagcaacacaacagcacaaaaaaacataaaagcgacggcgcagatgcgaacagcacggagaactaagcgactacgcactaggcaaagaacctaggcaactaacttatcccacaggcgaggcttggggctaggcacgaaacatctaaaagtcttcatactcggcttgctcctggagatactcctcggcggtcgggtcgaagtcttcatcttcatactctatatattattataaggggcaagggtgagtactttaacgtactcagcaagccagggaaaagaatgacatgtcggtctaacaaggaggctacggttttatttgcgaaggctgccattttggcaaaatgatttatttcacaaaactcctagtgagtgagtcaagttttagttgtcgggaggagactcacgcctcaacccattccacaagttgctttgcaacaacttgtcacgattaacgaacaacaaatattttgtctcctctattagttccttttcactttcacaacaacactaatccacacaaatctcctggttatcccagcacatcaacgccatcatggccctaacaacaccttggtgtcggacgacaccccaggtcacacagacccgctcctaaccacccaggttagccgtctgccacacaggcggactctggcaacgttacccttcccaataaccatttcttcacaaacatttgtcaaacaaatctacgctatgagaaacaccttacactcgcccttgaccgtgggcacggctgttcgaacagttcattaatctctgcagaggttgcacgctttacccacacgacacgaaacttacaccggtactggccgtgaccggaagttcgtgataaggtttttccaaagctaacccatgaaaatcgcatgccacctagttgggctaagatccatagccgagtatcaggcaataacagccgtcatccactcaggaaataacgaggatacctcctactcctactggtaccacgccacaatagaggcaaaaagacacccatgatgggcaaaattgtgtaacacttcgtctcctcatccttggcattccacaaccattggcacaccaactctcatgtgaaaacaatttactaagccagaggcatcccataaatacccttgtggtcgcactgtaacgtgttcggatggatttcccaaaggaatcggtccttaacgataatacgtagccaaaccacaaaggcatgactccgcatcatcaccactttcacaacacattttatttcacaactcctcggtacaacgtaccggatttttaaacatgtaatttggaataacccaagtttcccacacggcaacaacgtaagcatggctaagcgaaactacctcggtaatcgtataacgataccggcgcaaatatttgtggagctatcaaaggtatggaaacatcaacctatgaaatataagtgcaactactaggttggtccgtcggttgtataaacaatccgaggcctaaacatgttaatcgtgtgaactaaacaatgcatctttgcaaacaacatatcattgaaaatatataggggcaatgtgatcaaaggtgcttgccttgcacagggttggggtcttctccttcgaaagcggcgtccggagcttcttcgaactcgggctcttaacgcgaaaacaaagctaataaacaaaaggcaataaaacaagctcaaaccagagaaacaatagtaccaccatgtagatctcaattttagaaaaatttaggaacttgaacggggtcaatcggagttacggttgatgtactatgaattttcaaagaataaaggattttctgggatttatttattcgacggcaagggaatattccgttggaatattccgctagggttgacggcagagttggggcccacctgtcagcgaatgattggagggaaaaaggtgcgggcccgtttgtcagcagctattggaggggaggggatgtgggacccggctgtcagcggctcgggtctccttcttcttcttcctcctcgctcctggtcgacccggctcggtgcagcacgacgacgtgccgcggcggcaggacgcggcgaggcgaccggcggccgaggacggtggcggcggactccggcgaggctccgccggcgacggcggcgctaggaggcgcagggccggcttggcttcgtcctcgttcctcctctcgctctgctcgacccgggactggagcgccgaggtgtcgcggcggcggggcgcggcctgacgactggcggcagagggaggcggcggcgtcctctggcgaagctccgccggctacagcggcgtcgggagaagggcgcggcggctctggctggtggcaacagagaggagaacgagagagagtgagagaggaaagagagatgggttgggatggcgaggaaggggctcggggttccttttataggcggggcggctgggcggaaagcggcggcgagctggcagtctatgcgccgggaacccgggataggtggctagcttgctcggccggattctcggagaggaagggacggcgacgcgacggcttggtgtcatgcaccggtggcgactcgacggcaaaacgacacaaagggacgtgcagagagcgggaacggcggcggaacatgggtgacgcacggccgacgacggctatggccgggatttggggcggtaggattctcagatcgatgcgacgcgagcgacgtcacacggtggtggcgatggaacgcgagagagagggaggcgcgagctcggcggcttcccgggaggagacggcgacaagacgacgaggcgacggcgaagggacgcgcgtccgcggatgtggggcggcgacgcgatggccaaggtgacggcgtgaggcgacgggagcggcgtcatgcggcggtggcgacaagacgtgagagaaagagagagagagagacgcagctcggaggctaagctccttcctcacgaagcaaagggaacggataatggtagaccgagggtgactcggcctagggctaggggtgatggaggacgaggtggcggccgttatccgttggcgtcgacacgacgggcgacgggatggcgaggtgatgcccgcgacatcggacggacggcgacgggacaggggatgacgaggggtggcgtggctccgtgtctcccggagagaaaccggagcgaggtcgggcttggcgcggcgcgggcgtcggtttggtgcggggaaaggtgcggcgcgggtgttggcacgacgcgtagcacacgggagagtggctcggtgcaacacacggctcggcacgactcggcgcccgggtgaaacattccatcgaacaccttgtgtgcgtgcacgtggctggctcaaggtaggagaagaacagtactgggcagagttgggccggcctgttcgtgaggagaggagaggaaggggtggaggggagttgggcctgggagagaaaagagagaaggaggcccaattcgaacagtgagctttcacaattttccggagatttatagagtttgaatttttgagaagatttcaaaggatttgaatttgaatttgacctagggtttcatgggatcttaaaggcaattctaagagaggatttgagatctatttggcacaaaaacaattaagaaccaaattaactccaaaattttaaataacaaatttttaaataaaagcaaataaaatacgggtgctatacaatagcaggctattagccagctataaacatattttaatgagataaacgataagagagaagagcagcgggctacagatctatagccagctgcagcacggactccaagacacactatgtgtatgatacgtgggatcatatattaatagtatagtaagcaactattgtatgaattagctattagattagctatagataaattagagctagtagtgggatgtactattagacttgctcataatacatgtgcatgcagggcggccgggccttcacacgtacgcaacgtttccttgcaatgtaaaaaaaaaaaaaaagaaaatcttgtgtgcttaaccgattaccgcgtcgagacgacgacgagtgtggctgccggaaagacgaatgaggtcgccgccacggcccggccgccgtcggcccgagcaagggcgacgacgaagctcgcggagcattggacaccagctgcatcggcggctgcgtcgtcgtcatcatcatctcgcgctgtctcaccctgcacggaattaactgggcgcgatctcgtttcgttcgagctagcacttcacatgtatgatcacctcggctccagtgccctgcaatttattgcacggcatatatgcatgtgcgtatatacccggcgccgccgacggccgaccgcaccggtaccccgcactggtgtgaaattgttaacttgcacgtttctttctccggtgagctgtgtagattaattattaactttgcacgtctctttaatttctccgctgagttatgttgcgtaaaattgtacacctcctagctgagttatgttgcataaaattgtacacctcctatataagagcaagttcaatagtatatgcttactatattattaatatacggtcacacctgtcatgaagtccatgctgtagttggctacagatctgtagctcgctgctcttctccctcatcttctatcttattaaaatatgtttatactattgtacattctctaagtagtcttaattactgttaggcgcatcgtacgtcttttttctccgcacaaggaggtggacttttctttttcttttactttcttttaaagaaaaacaaagcgcgcgcacatgtaccctatttctgtgagcttcttcgataggttggttgctatatgttgagattaacgaagccatcatgagcttcttgttgtcgatgggtacgttgcgtaccacttaaaaaaaattagccgtaagtgcgagcacacgtgtcaactgtagaatttaaatccggatagactgattccaccataaagagtctaacctgttaaactacacttactttgacgaatggaaaaggagttggctactaattaaactatatacagtagaaatactatttttttttctctctacagaattttcaaccagacgaattcagctcctaacagttcaaaggctatctttaattgaagagataatccattctatgccattgacaaagcatgtattctaaaatataccactgacaaagctcagttctataatataccatcgaacaactagttttcttccttacatgtcatcaccgctagtcaacagttagtcaaattccattaggaggaagaaaatgtccattttacccctagggtatcatgcgtactcatggatttcattagtcacgatccactatatcttctcattgatgaaaaatagaaatcacttgtctttttgtcatatccaagattatttaatctcaattttatcctaggggtaaaattgtcattttttctcccttaacggcatatgactaacggttgactaacaccgatggtatataaggaagaaaataagttgttcgaaggtatattgtgcaactgagctttgtcaatggcatatcatagaacccgcgcttcgtcgacggcatagaactcttgaaggaacgtgtgggagtaaattaacacatgcagaattgtcacaccctgaaaattcaaaatttataaattgttgtttaaatggaatttttagaaataatttttttttaaaaaaaaagtcttgaagagaagatctagttttaattaataaattccaatataaaatgggcccagataaaatttcattaaatactttgcttaattctataattcctagatttttctgggatttatttgagctaaggaagtatttttaataaatggaattgcatttaagaaataatttaaattgaaaaaggttttaaaaagtcctcttttggctttgggccgaaagtcggcccaaaacccttctctctctcctcggcccagccggcccagtccgcagccgcagccgcccgcgcgtgcgcgctgtcgctgacaggtgggtcccacctgtcagggtcatcgtctaccttcggccgccgctgccgaaaccctagtttcgcgccgccgccgtttcctttccaaatccggccgttcctttccttctccggccgaattgaaagaggggaaatgatcctcgggatctcctctaccttttctcctttggaatcttcggctaattcgttttggaaagagttggattcgagttcgtctcggattcgttcttcccgatctttccttcgccgttgccgtcgccgtgggccttcgccgccgcctccgagcccctttaaaaggacccccggtgtctcctctacccgtcgccacccttgccttcgcctctagtcgtcggaatcgctctagcgccgtgtgccctagcttcgccgtcgccgccgccgctccagccgtgcgccgccgtcgtttcagccgtcgccgtcgctcgggaagaccaccgtcgtgctcgccaagtcgtcgccgttctcgtccgccccttcgccgtcgccggagatcaccggagcagcttcgccgtcgtcgacccgaaggttcccgccgcttcctcctcgtcgccgtcgccgtccgttggtcttccaccgccatttaggtcaccggtgagttcgccgtgttgtcctctacgtcttggtgccctccgtttgcgtcctagcgccgccgttcgccggcgagcgtgcgccgttcgagccgtctcctccgccgagccgccgccgctgtcaggtgacgtcaccgctgatgtcatcggggtcgtccgccgtgagccggtcgtggaccgtttgatctcggccgtccgttttggattggatcgatctcggccgtccgttcgcgtgaaccgccgcccgtgcgcccggtccaccgaaaccctagccgatgacgcaataaatccctttttccttttcaaaaataattcattattgcgtcataattcaatttaaaccgatataagtgttttaatccgatttaatctttaaaaattcataactaattcatattagctccgatttagttggttcaagtctctaaatttttctaaaattgagatctacacattaaaaatatccacatgtactgttcatgcttgtttatgtgctgttttggtgattttgctcttttctgcttagattcagtcgtttccggagagtccgttttcgcagaagaagagtttgaagagttccaaggccagcaaggcaagtcacacagatcccaaacaaccctttgagcatgttgatcctatttaaagctattgtttcttttcaactattgcatttattttcgaatgtcattgggtgaaattaacctattgtttgttatagcccttttgttcttgattactttattccttgataccttgggttattataatttgactagttgagctttatttatattggttcaactagatattagatataactgcttagctctgcttagaaacattagcacacttatgggataactaatgactcactattatttcatgatggcttattgatagttcacgatggtcaatcgtgattagttaattaattaatgtgtcaactaaaacctggtaatggtgggttgtgagcacatggttttgatggtcgtgctcatgacaattaaggaccggttcacgagtttcggttgtgaaacatttattgtgccaaccacaagccagcatgggcaacggctttatcttttgtatagcatggttcattgcggagcaccagactgagaagtggcggagataagcccacgggggtcgctggggagtccatgccttgcttataagggggtgattatgatccaggaaggtgcgctgcagtggattgtgttatgcgaggggtattgtcacaactcctttccgagataccgtggtggtattgaggcacatggtgacatgatgtggggttgtgtcttgtgggtacagtggtacacctctgatcagagtaaaactatttgaatagccgtgcccgcggttatgggcgggtctaacaatgtctttcgtgattagtctcacccctctcatcatagtaaaagatgcttaaactggtaataatttgattagctcctggtttggaatggtacattcctggtttggatatagaactgtgcagccgggatggttgttcagaatggttgggcctatacaacagggtatgttgtatagtgttggattaatattgattaattattacttaaccgttttattaaattctcaaatgtttgctaaatgctgcttttgcaaatgaaaccctattatgccatcctttgttatcctgtgcacttgcatatttgctgcgtggcttgctgagtatgtcatatactcaccttgcaatcattcatcagaggaagagttctacaatgaggctgatggtgtggaggattaggtgtagccttggtcaagctgcctgtggagtggagccgtctgcgccgtttattttattttttttccgctgcttagatttttattgattgagaggaactatctacctctgtaatgacattttattcgcttattaattagagtaataattgtactctattatcaatttgttattgtgtgcctcggctgattcctggacgagggtttacacacatgtaagcgtttggaattttggatagaaattccgggcgtgacaagaatgctgttgatgcgaaaaacacacactggcctgggagatctgcttagctccagtgcaggtccaaaggttgatgagatgcaggcgtgccagtcagtttgattctgcaactgacaagatatgtaaacagtagatcaaatagccgatcggctgacaagccgatggagtaattccagccgatagccgataatagtagatgccgataccaaccaatagcgatagggtttaagcaatcggctatatatccaatgtagataatgatataaagacgaccggctgatgatgataaataacaataatataatccagtataaaccaatcggctagcagtacaatatgatagaataagcactgatctgaaggttaaagcatgtatcagctgaagatccgatgtcataaaatctaaacgattagataaacagtgaaacctttgttgcaatcggctaaatccaactggtatgtaatccttgtaagccgatgcaacgtccagataacttatcggctagcaccccgataaaacattagcatgaacctatcggcttaacaagatttatattatcaacaacaatctagtaggttgaacctaaccgatgcagcacaagattgtatatgataatctaatactcgatgagccgatagatctatctaatgtgatggatataacaaatctatttataacagcgttgcgattgtagagatatatcggcttagacagaagatcagacctaactgagactgtcccaactaaaccgatgcgtctctaaacacaatgcaattaaagatagaattgagatatcaggtaggcaaatatatcaaccaaaccagagcggtccaagagatcgaagcgatgcagccttgaataacaccaatgtagccaatagattcaccagggctggcggaacgtaagacttaccccttcgccggagatcgaactgaaccgatgcagctctgcgttaggtgccaaatttcgccggatgataagtaaaaacctcgggaaagagggtggcgatgcgccgagagtagttatattgatcgagattgatagattacattgaccccgggtgtacaagtccttatcggacactaaacacactttcgtaaagataaaaggaaactaacaaactattcctaattaatagataaactgccatgccgtatccttattgaactcggactcttctggataaattccctttaattgatccgattccatcgagaacacggttgccagcgatttgatgactcccatcggttgattccaggactctgaagccgatattgactctaaaccgatgataactttggacttaccaaatttcactgttaacgaatgcacgcagattgataggtaagggttcggaacttcggatgcatgcatgtaatagtcaaatacagatgggtgggtcaaggttgcatttttcgttcaaaaacaaaacagcaaacaaatttgactgtgcgcctaattttgttggacataaaaaaaaagtttctgagccctctgattagggacggagggaaaattaaagttgtctgcaaagtttgaaactataccaatggttgtgacggtaggaacgactattctctccgtccaaaaaaaaaaaaactcaacctagtattggatgggacattttctactacaacaaatctggacaggagtatgtctaaattcgatatactagaaaacatcacatccaatactaggttgagttttttttgggacggagggagtacaccgatagggacatagggaaatattttgtctacttgtagttcaaatttaattttttgaaatgaagtgtctcatattgatctatatatcacgttaattttttaataaattttacaaaaaaataatgataggaaaaaataaaaggctttattagtttaatccccattaaaaaacggattcaagagaattaaggggaaataattttacatcataataatgcagaattaattaatcctctctaaattcctccaatccctttggatggatttaaacgaacacgcatggtttgcctggtggttgatctcgacgttcctggcatactattctcacaatttcccacgataaaagcaaattaagatcgagctactctactacatgttaattacagatgtgtcactctcaaaaggaaattaaagccagcatagcaagctaatttagttaatgacattaatttgggccaaacgactagtgatatatatacttaatttgcaaatggcattatttcactcgatcggttcacatgcatgcacccatgtgatctagcggccccggcatcctcgctgtcagatctggtggcgccgtggcggcggcggcgctagggttgccggacgcgcgtggagcttttgcttttcttccggctctagagcacgcgcgagaaaatctggggaaatggcgccaaccacgaaattcgcccgcgcaaacggaagttgaatgggtttccggttcagcagcatcgttaccgtgtggttcgtttcttacacacggtatgccggcccctgatgttaccgtggatacccacggtaagttaccgtgtgtcttatgaaacacccggtaacatttagcaacacacgggagccttccacttcccgtctcggtgcgatcgctcgagagctagctagtttttttttttttgagctctccactatgagtacaagctgtagtatctgaacatacgtgcaaacgcactccaccacgcacacacactccacacacacagacccctacacgcatgccactccacacacacagacccctacacgcatgctagacctatcaactatacacacgcgtgctaatgagatacataaagccacctaaggaccttgtgcgtgacgaggacgtcactctactatcgtggcgctggcacgggagagctagaaatttatttgggaataaatcccggtgagacgcgcgggtgacgatcccagggatcgaacccgcgcgggctgctcgctcaccagcgatgctaaccaaccgagcaatgctcggttctcgagagctagctagttaggcggcgggcagtctacgggggttcgcccatgcgcgcgcggatgaatgtgggtgcgcgtgtcgccctagctagcttcaccacgagatggacgccgactcggcaactgttgttgtcccatcataagcgaacgcatgcatggaacaccctcaacgcatgcatgtgaatcatagtggaaaaaaccggaccggtagatgacccggtcaccctcctgttcaccggtctgacggtctgaccgtgaaccggccggttgaaccgcggtcctgtaagtacatctaatttatgtattttcatataggcacacacatccaactggtagaatggttaggggagttgcctttcaaccaaccgaccaaccaaccgaccaagggtcgaccccccactagcgcagcttttatttcgatttttggttaaaaaatcaagcagacaagaaggcccaaataaatgggccgtcgtgtggcccattcgttcgctgacccggtccgaccgaaggcgttttattgtccggttcataacaaaaccggccggttcaagcggcctgaagcggttcgattgcatgtccggtctttctattcgaccgaaccgtgccaacctctggttccggttttttccggttgaaccgccggtccggtccggttttttccactatgatgtgaatgcatggaacgccgtaataaaaaaaaacaaattcaacgcaaagtgcaaaaaaagaacactctcagttaaaaaaatccattaaaaaggggcggaaaaaaagtcaccggtaaaaaaaaaaggacaaaaaagagtccgtttgaaaggccttctaaaagagccgaaaagagtccgtgtgtgtgtgtgatatatatatccaacatggctatattacacatcgtacgtatatatgttgtgagaaattttattgtcctcaataagaaagtaaattttattgctggttcttttgtagtacttgaccttcaccaggcccgacatctcttatgttgtgcaacatgtctgtgttcacacacctcactgctctcaagcgcattctacgctatgttcatggcaccatcgattttgcacttcatattcgtcgctcctctacggttgactagattgcttactctgatgctctacgggtgactagattgcttactctgatgctgattgggtgggctgttcggacacgagggaatacaccttgcgttatgtcgtgtttcttggtgataacctggtctcttggtcctcaaagcgtcagaatacagtttcccattccagcgccgaagcggagtacaagatcgtagctaatgttgtggctgaaacatgttagcttcgccaactactacttgaggttcgtacccctccgagccgatccacactagtgtattgcgactatgtgagtgttgtttatctcttcactaatcccgtgcaacacatcaacacaacaaacatgtggagatcaacctacataatatagcatgcttgcatggtgcttaaatataataattgttagtggatgatgatgtggcatctttacatattaagctttagaacttagtgggttataactttatagtaagagataattttattgatggctcgccataactctacttatcaaagatatggcaagtcacataactagccacatatttgactatttgtcttattaaaaaataagtgttcaaaagttaacgacgttatctattaaaaacggagggagtattttttttttgaaaaaataaaaataagacaaaattacaaacttcatattttttctaaaaaagaattaaaataaaaaaatactgaaatagtacgagggaggaatggggaatctaccatggatccttcgtcgacaaatagaccgctgacctttgaagaggtcaactgtaatatttttggcgttgagacgttgtatagctagcccaatgtcattgagattggtggtgagcaaaatatttattcttcaaatatgtctaataattatcaattactcacagtctgccacatcagaatttgcaagcattttgcattctgtaagaaaattttagtacgtataggcctctcctttgtcattttgttaaaatctcggaacatccatgccgtcgacgttccgtttgcagctgtgcgcggttgactagtctctgtaactttaatggccgcgtgaagtatatatctgacgagaaggcttctgccaggataattttgcacgttgtgacttcacaggaagctgtaacttatgccgccatgtggttttctttttcctggggacatgaaagttttgcacgaggtgggtttttccctcgtcagtgtggaaaacacatactagctgaacacacgtgggatgaccaatgggctttttggtgccaattgatttcgtacacaacatcgtctgattagtttgtaggcaaaaattaaagatatattacatatacaagtacaagagttatttttttaataataaaatttgttttgaccgtagaaacattgcaaattaaacgactgtgaattgcaaaaaaattgaaagcatgattaaaaacaagaaagttatttaaaatactatcctaaagacagagataacacatattattaaaacatcatctatagttgaggagaaaccgcataaccgttgtttctttagtgatttatgagttgcatgtagttcgtcttcatcaaattagaaaccagaatatctaaaaacaagtccgatcattacaccgatcaaatttcgttcacttcaccattgccaactgatgtcgaacaaaagtgaaaaataacgtcggagatgactcgtgcaacgagatcaagccatggccataaccattgaagttgatccggtagctatgccacaccaatgggaatccttcgacgagacgccaaaaaggttgtgacatctaggatgccgtcattgttattctggatcagtggcggatccagaaaatcgattcgttggtgtcataacatgtttatcggtgtcatagtatgctaattatgcttaaatcatagcgttataacatatgcataagcagtttcactataagttttgctgaaagtcgttggtatcgcctgacaccggcccttctagtgtagatccgcccctgttctggatatccagaactagattttcaccctaaaaattaatctcgaggcacaggtgtgtggtgctcatagacatcatcaatgttggttggacactgtcgtggtcactgatttgttccaccggcctgtagtttgatccatgttgtcgctagagagagttttttgtggacggaaggggggagtgaggcactcgctggagctagcattgccaccgcgaggcgcgtggtgggggcagatggtggacgtgagaggtgcagtcaccaatgccgcttctctttgttgtttcctacaccaccgccgcccatggcccgctgccgcatgccggagcctagaaccaatagcgcccgttcgacgactcaccactgcctccaccaataggatgaagggaaagcgccctggcccatatcacctttcctgcaccagcacgacctcgccaatgccaccttctcatgtctagcgacaaccttcgactgtctgagatgtcggagctgttgcacaatcatcatgagagtggatttgtcaccgccttggctagctgcctcactgtggttgcaccgtgcgcctccacgaatttcctcaccatcctcaccagctatttaaacaaagtcccttatttcctattgaacaataaatattctaacatacacacaagataaacttaccattcatataaaaacaaaattacaagaaaataataaaataaaacaacatataacaacaaaattgaagttaaaacaaactacatttgcacaatgcacagcacacaaatttaagcttagcaatgcgtaatttatgtgattgaaaatttacaaatatttaggcccctaaaatctatcaaataccttatttctatttaatacatgttagaatttatgaaatacatggaaacaattatgtatacaaaaatgtgcaactaatccattatcctagtgattcgtggccttccctttattttccttgacaacaacatgagacaacatatagctataaatattatttacatcattaatactttggaagaaacttcaaattgggtgcccgatctcctaaaacaatcggatagtcaaattttttagttgaccaccagtgaaacattaagctatacataatgaaaaaaatatcagccaataaagcatttaaaatttttgtaaatgacggtgaaaacatacgttgaaacatgtcactatcacgtacttcctccgtttcatactataagactttctagcattgcccacatttatatatatgttaatgaatctagacatatatatgtttttagattcgttaacatctatataaatgtggacaatgttagaaagtcttataatatgaaacggagggagtatgaaacatcgagtttcagtggattgaaacatatgtttttctttcattagaatataatcatgtgatacgttgttttaaagatttaattacaacgaataggggtgattggatcgtagatcagataagtagcttaggacaaaaatcattttgaagatcgctaaatgcatgcatgcaaggagtgaagagagagtagggacaagtagttaaatgaattttgtaaaacacagtgaagcacacattgaaacatgttagtgtcacatagaaaacattgagttttaacggtttgaaacatatatatatttcttttattagaatataatcatgcgaaatcttgtcgtaaagatttaattacaataaatacaatagtgtaatcgtatcgtaaatcggataagtagtttaggagaaaatttatctaaagtgagaagaggaagaagaataaactagctagtactcgtctcgcatgtatacggtagtagcagaggccctgccgaccctgagtattctcctagtactttggctcaccttgttctctcacaaaacttgttaagagtaaggcctgtttggttggctacctgagtaacatgtctgagaaaaatacgcgcctgtgtgggaggaaaaaatatgatgatgttgcctgggcaggcatgtatgagtttttgttgtttggttggagcctgagcctcaataaaatagatcctataatactacactaaataaggtctgcaaagctctgactcttgcaggaaatagcatatactacttgctaataatgtcctgagcctctccctggacgtcaggcctcctttttgggtcgcctgatccaggctaatgaaggtgcctgctcactcaggtcagggaggagttaaagtagtcagggtagcaaccaaacaaccaatattttttcttcggcatgtctcaggccaggcaggttcacctcagggcagcgaccaaacagcccctaagtgccatagctgattacagatttacagccggctttcattctctatctcttcttctctctttttcaacttagcacaaatcatatctaaggtggcaactaatataccctcaacatattgttgtacatgttattagatatatactaattattttttagaagtttacaaaacatagattatttgctttaaatccctccacgaatttgcaagatcaaatcgatctatacacagaaaaaaaaatccaaccgtagattccgtagtgtaatttttttttatcaatgtgtaacttgaatttgaacttctacatggagctaggggatttgaaacacaacatttcttgtctattatttagaatttttcatagaactatttggctcgcaagcaagatattaaatcgggatttagaagttgttttctgaaataaaaaaaagacactattaataactattaaggataccgacgaattaattgaatattatgaacttaaaagacaaatttaattaaaacagtttcctaagacattcacaatttttttttgaaaattaaatcatccggaaacgtgcttattttttattccgtttcattctagggttcgaagagcacaccgtacgaacggcatgagtgaatgattcccggcctcttcatttcgcttatgcatatacttattaactaaaatttgaattttcaatattaaatttggagatgattttaaggttttttattaaaatttattttttagtctttgcttttagatcgataagaacacatatataaaagttttattcacaaattacttttcgtttaccaatataccgagcgaaacgatggctccgcaaagctctacaaatatggggaggcactcacgccagaagcaaggcaaattaaacaaaacgcatcatcaatggagacgagggagctgtgggtgctagcggcagcgctcgccgtgtcgctcctctactacctcgccgccctgatgcgctacgccggcggcggctgtagcaggagcagcaggccgccgttgccgcctggcccgacgccgctgcctctcatcggcaacctgctcagcctccgcggcgtcctccaccaccggctcgcgagcctcgcccgcgtccacggccccgtcatggcgctcaggctcggcctcaccacggccgtggtcgtctcctccagggacgccgcggcggaggccttcacgaagcacgaccgccgcctcgccgcccgcgtggtcccggacagcaaccgcgcgcacggcttctccgaccgctccatcatatggctcccgagctccgacccgcggtggaaggcgctgcgcggcatccaggccacccacctcttctccccccggggcctcgccgcggtgcgctccgtccgcgagagcaaggtgcgcgacatcgtggcctacttccggtcgcgcgccggggaggaggtggtgttcggcgaggccatctacagcggcgtgctcaacctcgtctccagctccttcttctccgtcaacatggccggcgtgggctccgaggaggcgcacggcctgcgggagctcgtggaggacctcgtcgaggcgatcgcgaagccgaacgtctccgacctcttccctttcctccggcagctcgacctgcagggcttgcggcggcggacggaggagcgcatggcgagagccttcggcatcctagacggcataatcgatcgccgtctggcgaaccgcactcacggcgaccggcacggcgacttcctcgacgcgctcctcgacctcgtctccgagggcaagatggcccgggaccacgtcacgatcatgctcttcgaggtcttcggcgccggcagcgacaccatgtccgtcagcctggagtgggcgatggccgagctgctccgcaacccgcgcgccatgcgcaaggcgcgcgcggagctggaggacgccgccgccgtcgtcgaggagtccgacgcggcgaggctcccttacctccaggccgtggtgaaggaggccatgcggctgcaccccgtggggccgatcctgctcccccaccgcgccgtggaggacggcgtggagatcggcggctacgcggtgcccaggggcgccatggtgatcttcaacgcgtgggcgatcatgcgcgaccccgcggcgtgggagaggcccgacgagttcgtgccggagcgcttcatggagacgactacggcgatcgatttccgcgggaaggagtacgagtacctgccgttcgggtccgggaggaggctgtgcccggggctgccgctggcggagcgcgtcgtgccgttcgtgctggcctcgctgctgcgcgcgttcgagtggcgcctccccgatggcgtgtccgccgaggacctggacgtcagcgagaggttcaacaccgccaatgtgctcgccgtgcctctcaaggtcgtgcctgtcatcgtcaactagtcacaccttccgtatagtatcaaaatatataattttgaaacactcctgttcgagagagtgctttaggagaaaatgcaagaaattaatgttcttgcatcacttcctccaggtttataattattcttgatgctttgtacataattggggtcaaatttttataactttgattatcaatacctttaaaaatatagacactagattatcttacaaatatatttaattaaaacatttgttaatagaagtaaaaaaatatttatttactatatatattataatagaaaaatatagtcaaagtatatttagataccgtgacaatgtccaaaacatgcatgaagagttatggaaccggagggagtaaacaggtggcacacgtgctcacatgtatgcatatgcgtccacctctccttttcctctcatgcatgtatttacattaaggatcgttaggagggaaaatatttatttccgtcgaggcgatgttttctcatttcttacatattttacctagctataattttttaatctttgaaacaacataaattaatacgttatatatcacttaagaaaactgaaaaaaattgaaagtgcaaattcgatttctataagttgtaacaaaaataacgtatataatcgtgaatgtatatatgctagttagagcttaatttattcttttctataacttataataattggatttgaccttgcattattatatatgtaatggtatatcttattggcccgttcggctgcctgtgctgcggctgtggcgcagccggcaccaacagtgccgcacacacatagcgtagccggagccgccgccaccgcagacaagcagccgaagaggccctatattaatttattgtgtatatatattttttttaaaaaattatgattatataggtgacatgcatgtagaaaacgtgtggacatccactcgtagggtgaaaatccatctcctcgttaacaaactaaaaatgtttttcgaatcaccatgagaatttctagccttttatttattgatatgacatgtaagtgtactataatgttgataaaaatgttgtgtaagtaaatatgtattagttattttatttaaaatataaaagtatagtcctatataactaaaattacatttgtaaattcagttgatatgatatgtaagtgcactgtaattttgataaaaatgttgggtaagtaaatatgtatttgttattttcttttgtagttcgttggatgtaaatataagggtagaaaaaatctaggtaatttttttttgttacagatcacccgacaaatggataggcagttccaatttcggttttcacagtatttttgggaattttagaatttttttgctcgaaaccatttgataatttaacaacttttgagttttgaaagaacttaacaaagttcttcttgctgctgctgacttcttgttgcttggcatccgcgaagcacaggggtaatggcacgaggtcgatgacgctgctgttctatggcaaggatgagctgcggaggtacagaaagatcatggattcatggcgtaggtggccaggttgaagaaggcttctgtccaggcaattatttttcttcttttctctcacttactccaacaccgtcagcgctaggagtacctagctgcttgtcctcttgctgtcgtgagaagaagaaaaactcgaggtctcgccggagctaagctgatggttggctgtcgtgttgtgcatgcagagcccccacggcgatgtcatcgactgcgtgccgcgacgcttgcagccgacgttcgaccacccgaacaacatagagatttattttgcaccagtttcaataattaaagtataacagacgattctaacaagatcaagagttaaaggaggtaacatagacttattcctatagcagacggcccaaagagacgagagacacagaatagatttttattcctatagcagacggcctaaagagacaagagacacagaatagattttttttctccagggaagaccaccgtgggctttcatgtcttcgggccaccctggcatggctcgaattttattcggccatgcctgggccgtcgttgcaccaagtgggcagacacagcctggtccagtgtgtaggtagggctatactgggccaactgatcttggtcacggaccgtgtcgggctgggcggcccattcggccatcgttctagctatttgcacggcgtgacaagaaagtactccctccgtttcattttatttgacatcgcaagttaatctcgaaattgtcctttttatttgacgctgtagtttagtcatattgttggtttccatctttgccctcctcctcgccctcattcctcaaccccctccctccccccccccgcgaggggtgccggcctcgcctgcacgatctccgccgaggccagcgccgtgctggccgtcatgcgccgcagccttctccacccgcgcgccacagccgatgacgccgcggcagaccacccgctcgtctcctccctcgaggcgctgcgctgcctcgtcttctcccctgccgccactgctgccgcgcccgcggtggtgctccccgcaactgtgttgcagcccttcctcgacgcggtctgctccgaggacgccagcgccgcggtcacctcagcgtcgctggacgcgctccatgaggtgatggcgctcatgggcctgtcccgcacgggcgccgcgctgcgggaggtcatggacgccgtcgccagctgctggttcgaggcttgggccgaggccgccgccgaggaggtcgtgctgatgcggatactgcaggcgctgctcgcctgcctgcgcgcacccgtgctaatgcggatttctgttctttgttgttcgtcaacaaattgtcaacttcacccaaatacttttcagacaattttttagggttaattggatccatgccactacaaatatgacatattagaaaaatatcactactattaatgatatccgctacgtgccattggaatttgtgaaaattggatcatgtcactgccgtctagttttctgtcaaaacctctgttagctctctccctcatcctctcttcgcttctcctccaccttggcggcgagcacggcaaccggcggcgtcgacttaaacgctgacggctccgcggcggcgcgcggccctctctctagtaagagcgagttaaataggcagcaccgtgctctgcaaactttgcttgagcccgaacgacaacagcagtgccggaaactgccacggcgtgtgcaggggaaagtccatggcagagtagtagtggttgagctaactgaggccagcgtgaggtcgtcaccgtatgggcattgggcaagcgcgtcacctggtgattcaccgtgagccgccgctgccgcggcgagctgggtgtcgccggcatgcagctgatttggtttgcgggaggagggatggcagcggagcacggggacagcgtcggccggcggatcctggtggggatgcacatggacggcgtcggcaaggagctgctccagtgggcgctcaaccaggcgacgaggagcggcgaccgcgtcgtcgccgtgcacaatttaccgcaaatccggctcctgcttggcgccggtcttcaggaacctgcaagagctgattccgtcgcacatcgcgctggaggtgctcaaggggaagtatggccccgaggctgacatctggagcatctgcgcgtcatgctctacaactcatcttcctcgccggcatgccgccattctgggccgagtcggagagcgccatcttcaccgccattctttgcaagcaaatcgacctcgccagtgaaccgtggtcgaagatctcctccggagccagggtatgacgacgatggcggtagaagacaggaagagtgccggtggaagagaggaacaagagagatggaaggggaaggggcaaaagtgacatttcacaggtggattagacggaggttgacagaaaaatggacgggagtggcatggttccgattttcctaaatttcagtggcacgtagccaatatcacgaatagtagtgatatttttctaatatatcatatttgcagtggcaagatctaattaacccatttatttctcttctttttccaagaacatgttcttgatttctgattgcagtttattttgggtcacatggataactgcaactgcaattcagtgctatgaagtcacaataatcccaacctacttgctcaatcatttgggcatgatgtcaatcgaccctgctgaaatttatctagagtttaaacttttcccagttcttgagtctattctttgaaccagagtttaaacttttcccagttgtgctggagtacaacaaatctgtgttacttctggccagtccactggtgagtggtgaccgtccgcctcatgcttctttctcatccaatactgcaagcgcttgcttcatcttagactgcaatctgatcttagattaaaaatagatcttttagtcctgatggtaatataccaaccgggactaaagatgggtaacggcagtgtagggttgtcacatttttttcttttttttacattgtttctctgttgtgagctgctccaaatcaaattaacattacaaatcatatcatagactaacatcacaaattctcacaaaaaaatacatcacaaacaaatcagagattcaaatcacaaattctcacaaaaaatacatcacaaatttttaaaaaaataccagatccatctcagatctgaatcacaaatatccatctcagatctaaatcacaaattcttatcttaaaaagaaaaagaaaaaacaacgatgccacgcgctgccggctccggcctcccctccggcagaggggagggcgccggcgccgccctctgccggctgctcgctgccgcctgcccctgccacgtcctggcgtgccgcctcgcgggccgccgccgccgcgcgcagactaggaggaggaggacaggaggagagaggaggagaggtggagaaatggttaagtgtggaggattggaggagagagcagttgtcgagagataagtatcgcgcacacggctctccttgatcgtcgatctctctcctgtcggtcggctcccagttggtagactaaagatctatatttagttccgtttggtaacatcaaccggtactaaagatggttaagtcctgacttggtccgataatttttaaaacatggagtaaaatttatttttagtcccggttggtgttaccaaccggggctaaagatcgttttacttataaactgggactaaaaatgatttttactcccggtttttagatgaaccatgactattgtggtttttagacacccgacaaagatcacttctccagtagtgaccctacgccgtacacattttagacgttacaacagataaaagataaaaaataggacaaaactgatgatgcatacttaactgtctcctaattggaatgattgactctactgaaattagacgaggttactaagtactgtctgcagctccctagaggtttggaaggatgacatgcatgataatatagtaaaagaaggttactaaatttgaagtacaatcttttggcaataacatttagtcccgtttagactaatgcactggtattaacatgctaactcacatgaacttaatgtggagaatagggtcgatgagacagtataacttgggttatatgttattgttggcaactttttgtgacaagttgacaagcacgatcgcaacacctaaacggcttgtggtgatatggagtcgccaaccacctcgatctagccaaagggccaaattaaaatgggttttacaaatagaaaagctaaaccggctagcggagccgatttagatcgatacgaggataactacccgtctcgtgggcaaaacggaaggttttcaggacaaacctacaaagaggtgtcgcactctcgcagcggcggcggacggtttacggcgcaaaccgacaaagatggacaaactaagagaaaactaaaagcaatatgaaaagaacgattcgattgattgatagtagattgatttttataatgaaccggccttgttccttatataggggttggtcttgccctctacatgcccttctccacgtccaactcggggtagaaaccaaaggaaacctgaaacatatcttcccgagcaaggaaacctcgaaacccgacgcaacagaatcggactcgggcctgccggtcagaccggccacacaccgccggtctgaccggccttcaaccggcggtttgaccgcccaacatatggcgatcagaccggcctacctcgaaggaaaccggtagacttccaaattttggcaatatctcctatttcaaacctaggtgccaaatttgggtgtaaacacatgcccccctgcctttttgatgaagagcgtgaatctaaaagcatagagcatgtttttggtcttaggacgataatccaattaccggctatagtacctcctaagcgtcttgccaaatgctcgggaagtatttcttcaagtatttcccgttgattgctcgctgaaaacgctccccttgaagtgtctccaaaaagtatgcgttctttcaaacaatgccgcatattcgataaggaccttcccaactaggagaccacttaccgaactccttggattgagtacccaaaggcaaaattgtcttccaaaccaagtctccaacttgaaacaattttgctttcaccctcttgttgtatgccttggccaccatcttcttctctttctctatctcttccaatgccttcaagcgcttgtcgatgacttcatcaaggttgtctcccatcaaagttttgtaatcttcacttgacaaatcatcttgcttgatataacgaagagaaccaagatttacctccaccggtaaaacggcttcttgaccataaaccaactcaaaaggagtgactttagtggcaccatgtttagatatcctatgcgcccacaatgcttcagaaagcacctcatgccacctcttcgggtgttcctcaatcttcttttttactagctttaagaatgtcttattactcgactcggcttgaccattagcctgagcgtagtaaggagaagaactcaacaatttaataccataagattcggtaaaactctttacttccttagacataaaagaagcaccttggtccgtagtcaatgtttgcggaataccgaatctatgaataatatgcttcaaaataaagtcaattacctccgtatgagtcatattcttcaaaggcacggcttcagcccacttgatgaagtaatccgtagcaacaagcacgaacctatgcccctttgatgacgaaggataaatttgaccaatgaaatccaaagcccatcctcggaacggccatagtttgattatagggttcaacacggcggcgggcgccaattaaacattgccgaaccgttgacaagcctcgcatcccctataatatttaaagcaatcatcaatcatcctcggccaataaaaccccgcccttctaagcaaccaattcatcttgtgtgccgattgatgagttccacaaattccttcatgtacttctcccatagccactttagattgattttcatctaagcacttcaacaagacaccatctatgtttcggtgatacaaatctccatcaagcaatgtatatttgaatacttgccgccgaatctttcgatcaaccttaagtgtgggatctttcaaatattgaatcaaaggaattctccaatcctcttctgtatcctgggcacaaacgtctgaattcacaattaattcggcctcaaaatcacatgaaacgtgccctccagcatcctgcctagaaccggtcagaccggccacacagggccggtcagaccgctcggggtcgccggtcagaccggcagcatgcggccggtcagaccgcccctggtcaccggtcagaccggccatgcaacgccggtcagaccgctcctggtctccaatcttgccaatttcgcacaaagatttaaaatcaagcaccggctcttctaaaatcagaaataacccctttttcacattataaccagatgcttgttgtgctaagtcatttgctctagaattatcatgcctagcaatatgtctaatagcaaaattatcaaaattggcaataatatctaaacatgaatcgaggtacctatttagtgatccatccaagcatttgtagattccggcgacttgttgcaccaccaattccgaatcaccaaagtcctccacatatttagctccaaccatctccataacttgtaagccgaacaataaagcattgtattcggcttaattatttgtgcaataatattctaaacgaaccgatgcctcgtaacacatgccattaggtgaaaacaaaactacccctatgctttgtccttctttgcaagaagaaccatcaaaataaatcttccaagttataacttcaactaagcaaacatctccctcataagcaacatctatatgatggtctactataaaatcacatacaatttggccttttatagttttcaatgattcataagctaaatcatattctatcaaaccatatgcccacttgccaattctcccacttagaattggcctttgcaacatgtgtttaataacatcggcttgacaagtaactatgcatgtactagataacaaataatgcctcaacttggtacaagcatagtataagcatagacaaagcctctctataaaaacatacctcgtttcggcatccaaaagacggcggctcaaaaaggtaatgatatattccttgccatcttcctcttgcatcaaaacggcaccaatgactttgtcctcggaggcaatatataaccgaaaaggctttccggctttaggcgctcgcacaactggtggagtagataaatacctcttcaactcttcaaacgcctcttgttgttttgccccccaagtaaaatcggcttcttttttcaaacgaagtataagaataaaagcatcgattttacccactaggttagaaataaacctcctcaaataattcactttacctagcaacttttggacctctttcttgcatgtcggcgctttgaaatcacgaattttttctatcttcttaagatcaatctcaactcctctctcatgcaccatgaatcctaagaacttccccgccgacacaccaaaagcacatttaagtgggttcatcttcaaaccataccggcgcatcatctcaaaagctaatctcaaatcggctatatggccttccataccatccgatttgacaacaatatcatcaatatagatctctaagaaaatacctagcaaatcatggaagatcaaattcattgccctttgatatgttgcaccggcattcttcaacccaaaagtcatgacaacccactcaaacaaaccaacaaatcccgggcacctaaaagccgtcttgtacatatcctccaccgccataaagatttgattgtagccggcattaccatctaaaaagctaatcactttatgacccgaggcatcattaattatcatgtcggctataggcataggatactgtcatgccctaaaaatcgactaaattaaaaatgcatattttaaatcatttttagaaaatattttaaaagcctacaagctaaaccctaattttctaggaaaattttcaacataaaagtgagctagataaaattttattaaatactatgcttgctcttctattttctagatttttctgggaattatttgagcaagggaagtatttttaataattgaaataacatttcacaaattattttttatttaaaaaagttccaaaagccctccctaaagccgttgggccgttttcggcccaacatctcttctctctccgcgcggccaagccggcccacgccggcccaacccacccagctgccgtcaccaccgcccttctctctcatgtcaccgacatgtggggcccacatgtcggtagcatctcctacctccagccgccggccattccgagcccgagccgcccctcttccgcctccgaatccgcctcaatccgaccccgtttcttccggatttttgaggggtttttatcctctcgttctcctctatctttcccctcaagaatcggagcaaatcgttgggtattttatccgaatcaaactcgttttcgagtttatctctaaaaccgagtttttgatttcccgaagcgatttcttgcgggaggagtccgatctcttcaatccaaggctataaataggaccacctcgtcgccctctttcgtttgccccaactcccgtcctctcccgtgctccgtagcgccgccgccgcgcgcgcctagttcgtcgccgccgccggccgaagtgcagccgcgccgccgcaccgtcttcgccgtcgccgccgcttgccgtcgccgcccgtaggtgcgccaaggggtggagaagcccggccgcctgtcccccttcaccgccggccaccggagctccgccgtcgccgccgaccgagccgccgccgccgtccacctcgtcgccggccatcatcgttcgtcgtttggctcgagggtgagtaccgtcgggttcgtctcgtcgtcctctacgtgtacatgccctccaattctgcagccggccgctctatctccggcgaggtcgccaccgtggttcggcggttgggtgatgtcagcatgacgtcatcgtttttttctttttcccgattttctaatagattaaatcttcggaaaatcataactaaataaccgtagatccgtttcaggtggttcaagttgctaaatttttctaaaatcaagatctacatgttaaaaatattcacatgtactgtttatgcttgtttttgtactgttttgttgatttttgtttaattgctttagtttccgacgttccggaggagagcgtttccgttgaggaaggttccgaagcgtttgcggaagcccaaggcaagtcacacagatcccaaacaaccctttgagcatgttgaacccatttaaagctattattttatttcaactatgcattgtttttgaatgtcatcgggtggtgatcctttcccagttaattattggccgaagatgactttattttcctatgggttataatttgattagcgtgaaccttatatattggattggttcagctaaatgctatatatatgtatgcttagccatgcttagaaacattagctaattaaagggattaattataaactatgttatattattattttaattatggttacattaaatggtagctcacgatggttaatcgtgtgatgttaattaattgataattaaaacctggttaaggtgggttgtgagcatatggttttgatggttgtgctcatgacaattaaggaccggttcgcgagctactgttgtgaaacatttatcgtgccaaccacaagccagcgtgggcaacggctttatctttggtatagcatgattcattatagtgcgccagactgagaagtggcgagaagtccacgggggtcgctggggagtccatgccttgtttataagggggtgactatgatccaggaaaggtgcgctgtagtggattgtgttgtgcaaggggtattgtcacaactcctttccgaggtaccgtggtggtattgaggcacatggtgacatgatgtggggttgtgtcttgtgggtacagtggtacacctctgatcagagtttaatctattcgaatagccgtacccgcggttatgggtgagttgagcaatgtttttcgtgattagtctcacactactcatcaatgttaacaatgtgataattaatttgactcctggtttggaacggataattcctggtttggaggtttaatttgttcaactggggttggttgttcaaatgtggttgggcctatgcaacatgggtgtgttgtatggtgttatttaatattgattaaatattcaactgtttttaccattctcttaaatatttattaaaggctgtttctgcaaatgagctatattatgccatccttcgttatcctgtgcacttgcatatttgctgtgtgacttgttgagtatgtcatatgctcattcttgcaatattcattcatcagaagacgagtatctcagtgaaggtgatgatctggaggattaggcttgttcttggttaagatgcctgtggagtggagtcgccatagctgttccgtagtttgttatagttttatttccgctgcgtagagtgttattctttgagaggaactatctacctctgtaaacttttattatttgcgaatattaaatagttatctatttgtactctattatcaaattgtcattgtgtgcctcggttgattcctggacgagggtttaacacacatgtaagcgtttggaattttggatagaaattccgggcgtgacagatactcatctttaggagtagctttatttaaatctctaaaatctatgcaaactctaatcttaccactccccttcttctccaccgggactatgctagaaacccactctgcataacgacatggcctaataaaccccgccttcaataaccaatcaatctcctctttgactcggtcatataataaaggattaaaacgacgaggtggttgcttataaggcctaaaatccggtttaattggaagccgatactcaacaagctcacggctaagacccggcatctcatggtactcccatgcaaagcaatcaacatactctttaagtagctcgattaccttaaccttataatcggctttcatgtttttgtttacaaaagtcggccttagtttagttccatcacctatgtctacttcctctaatggatcggccgatgtaaaccttgtccaagcttctcaacttcatcaaaatcttcaacggtttcaccaatatcgttctttgtagaccgatattcttgcaccctcttttgtaactactctaaactagcctctttactcattatacaaatttatatggcttagccgtgctacactagccggctttacagagataggtacaaatttgccatcggagatactaataaaatcataactagaaagatccctccctgataagcattggatattcccatgatgccactcaaacgtagcatcgcccattgcaacctcggccgatgtatccgtttgaacaatttcaacatcatcgccgtcccattgaattaaacattgatgcaaggtagaaggcacacaacaatttgcatgaatccaacaacgacccaaaataacattgtagttaccttgcacatcgacgatgaaaaaagcggttggtagcgtcttgtttcccacggtgagctccgccgaaaaaatacccctcgcctccattggttcaccattgaagccattgaggatcatgttgatcttcttcaactcatcatcctcacgccccaacttcttgaataacgaatatggcatcaaattcacggcggcacctccatccactagcatcctagagaccggtttcccatcaatatggcctttgagatagagaggcttcatgtgactgtttgactcatcgggcttctcaaataccgcgtctttaggacctaatgagaattgggcaacctcggcttcatccatagcacaaaactccataggcaacatacacaccttgttgatatccatgtcctcctttggagacgatttatctttgtcaaccgattgttcttccttctcctctacatcaatcggttttgccttctctatggatttaggcctccataccggtggtggtcgcaactcattgaaccttttatccctttgctcttcggcctttttctctcttagttcttgggcccgaagacgttgcaaccttctcttttgtgtagccgtcaaatccttaggcatctacctaggattcggctctgttccaggaggcaaataatgtcctctattaactttgttcgaagacgatgaagccctcacatcgccctttgcagccctcctgtcaaaccggcgctggagcccggtcagaccggccagatgcgccagtcagaccgacgttgggcatacggtctgaccgacctggggcgtcggccggactgtcgtcaggtcggcggtcagaccggccaggtggcccggtcggaccggaagcatggccgcggtcagaacggccagaaggcctggtcagaccggccgactacgaggagctggaaacggcttcggactttttgtttggagactctccaactccatctccagaaggtacaggcacatcatgggaccctatcttggtggtaatcacctccgaagtcctctcttctaccttgacgcgctttccttccctcttttcttcattaacccgatttttatcataaaatcggcttttgtttggtgaggacaaatgctcatgaattggcctccgtggtcctccccacccttggttgaattgcattggaggcatatggttatacattggcggcgttgccctcaatggcatgaagtaaggaaaagaataacccggcggcggcattggatatggaccccatgacatgtcttgtggatgatgatatgaaggtgaaggcgatcgtcttggtgaatgaccaaatcgctccctagggggtgatcttggtcttttccctttgttgtgattcttctcaccaccttgcttctcatacttctccaaaaacatatcaaaggtcaccttagtcttcctagtggccttggaagttgaagctccacttttattctccttccaaacaccaacctctggcttctttggcaccatcatcttgggtcttggctcaccaatgaccacttcctttcccttagtagattcggcttgcttcggccgaatcaacaccttcttattattgaaattaattgtattcaccggaaaaggatcatgatcaagcttcatcttggagccatcggtgaattttaatcgtccctcatctatggccgattgaacctgtcgtcgaaacacattgcaatcattagtagagtgagaatgagaatcaagccacttacaatatgctcgacgtttcaactcttcttgtgatggtatgacatggcctttaggtaatctaatttgtttttcttgcaaaagataataaaaaatcttatcacacttggccacatcaaaactatatttaacctcactttgccgatctttacgaggagtcggcattaggttagaacaaacaaaaggtttatttttgttagtccatgaccattcagcaacataaatatcatgatcaccctcctcctcactatcactagcatcagagtaatcaactacattaacattaggctttttgtcgaatggtctagcaaattttttattatctttaacccggctttcttgagccagagccctttgcatgagttgactaacatcaagaaattgttggccatctagtttctctctaagaggagcaactaaaccattaaaagcaagtccgaccaaatctctatcagttatattcaaagtataatatcggtttctaacatctctaaacctcttaatgtaatcaacaacagattcattatacttttgcttaaccgatgttaaatcacataacctaagctcagtttctccagtgtagaaataatcatgaaattgtttctctaattgagcccaagtatgaatagaatttgccggtaaagaagtaaaccatgtaaaagcattactggataaagataaagaaaataagcgcaatttaaaagtatcactattagcctcaccacattgcgctaaaaattgacctacatgctcccatgtggtcttaccatcctcaccactaaacttggtaaattcgggaactctataatttctaggaaacggcacattatcataataatccggatatggttttttgtaagctctagcacgattcctagtttcgatcccgaatttattcctcataatatcactaatcatgttcttcatgttattaggcccttgtggatttggtggcctaataggttgggtttgcggcgcaatatgattatattggccttgcctagtatcgggagggtatcccctattaatatcattgtaggcattacggatatgtgggagaatttgaggactagtggtggcagtagatacagaggaatcaaatgttctaaagtgatacaaataactagcattagtcattggatctattccctgtatcgggacaattgtgccggtctgaccggcccaaggcccggtttgaccggcgtcaggttgcgcggtcggaccggcctgagggccggtctgactggtgggataatacccggtcggaccggccatctggcaccgccgccttctaccgccgcccactcctgcgcgctcctccctccaccgctgtgcgggccgccgccgcacctgccgcgaggagcggcgccggttgataacaccaaccgggactaaagatcgtaaaagtgcggtgggcttttaaaccaggacaaaagatgatttttaatcccggatccaataggaaccaggagtattgtggttttagaccgacccagcaaagaacgattctcgagcatcgcaatcagcatgggggttgccagagattcacatggacattgctcaacaacaaccctcattgagagggagattgaaacctcatacgctgtcgtcttctttacgcaattgccttcacccgttgcaaaatatgagcacttttactagtcaaattaaaaaaataaaaaaaaccagaaattttgtctgagatatttggttgccagtgcagagcgaaattactgaaattttggaaatatcgaaccgaaataaaaaaccctccggatctaagcctcgtaaattcagagtttcattatttccacttgttacagggtcttctgtctctatcacaagtcaaacctagcaaacattttcctcagaagaatcactccctgtcacaagtcaaacctagcgaaattttcctcagaagaaacaaaagtgagagatcactctagagaaagtatttgttacacctagatccaattatacctagtgtatgcatatggtataaataatcaaataaaatttttgaaaataatttggtaacatatattttgataatataagttagtatatacaaacatacaacgaccacgttcgatctatgcttgaagaaataaaaacaacaaatttgctctacattttgcagtgtcaacttttattttttttttcttaaagtataatcataattagctatgcatgcatgttggtacatatatttctagcatcgcaatcaatctaaccagattaatttttttaaaaatattttatgatgatttaaatgatatgcaaataattaggtgcagtgcacctagctgtaaaaattccaggtttgatcaacctatggctacacattaaataaaaaaaaagacatacccaaatcaatgtgggtaaaattaagacataaccaaatcactgctggagaaaggggcttcattctctgttgataaccccttatagtcccggcgtatggctacacataaaatacaaaaaaaaagacatacccaaatcaatgtgggtaaaataaagacacccaaatcactgctagagaaaggggcttcagacccggttgataaccccctatagtcccggttatacaatcgggaccacgaatccgggactaaagatgcatctttagtcccgggtgaaataactgggactaaaaatcctcctttagtcccgattggtgtttaccaactaggactaaagatagtagtcatggctagagtatttttccctctttttttccattgtttttacagtttgcaccttttaatttcgaccaaattcaacaaatcatcaaaaaaacatgcacaataaaatcattcacagatcatccacaaattcatcccaatctaaaagaaatatacaatctacgaatcattcacaaaatgtaaaaacaaaaatcaacacggttgctttcatgccgcccggccgccgctgcccagccgccaccgcctgcctgcagcggcccggcccgtctgtagccgcctcacccacctgcccgcttgcagccgcctcgctcggccaccgcccggcctctcctcccgctagatctggcagaggggaggccaccgcccgccgtcgccggaggagtggggagggtagggagaggagaggggaagtggattggaggaaggggaaggagaggggccggaagggaggaggagatggatggcggaggggaggaggaaggggattgattaaaaatattgacgaggggatggatggtctttaggagataagtcgaggcgcgcagccggctcagggatgctgcacgattttttttttatttttgtcccaggtgatgttaccaaccgggactaaaaataaataggaatctgccatattttttaaccggggctaaaaaggatctttagtcctggctgatattatcaagcgggactaaagattaaaaagttccggtgggctttttaactgggattaaaaatctttttatttctcctgcagtgaaataaatttcaatacatgcatacatttacagattttcttatccgggagacaaaaaaaatattatccccacatatcttactaggggtcccgtagcatggacatgaaatttaatttgtctgcatcacgtgttgaatagtcttcgccggaaagtagaactgcatgcatttttgctacgtggtccattcatgtgcgacgatcattgataaatatgagtaaatataatactttcgactatatatattatagtttcactttagagcactctttaagttttttttttaaaaaaaattgaactaagtacaagtattgttgataaatgatgcactttgacttagtgacccggccatatgtaaatgagacagagggtttcaaacatagaagtgcaccctgcagctccctctctctagacccatgggcaccaattctgctggctagtgacaacgactcaactagatgtagtttttattgccctttcaaacatgtgctttgatatatagtttgactacacatgtagttgtggacaaatagatgaatcagtatggcctccgcttcgatcgggatatatcatacttactttgcaggttgtggtttagagaaagaagcacgatatatgaaagtttgcaatcattgttgaactcaattcaaaatcgaaagtccatctacaccacaaaatatacatatttgatatttttctcttagtgtgtaggtccagtttggactttaaattttgtaaaacgctatatgattattagaccattactatcaactttttgcataagcagttgaaaatcatttaagcagtgtgaaacgtgttggcacagtgcctacatggtatatcaaagtcatatatagcacagaaatgacaagtaaaagataatcttataagtcgctgcaaaatttgaattttaaaactaaaattcaaagttttctcatcacagtttattttcgagcattgactttgaaattgttaaggacatatatatttataaaggtgttacctataaattatttatcttttgcttataagttgtactgatcataatcagcatatggccaatcgatagggacctgctgagatttcttgttcgttataaacattaagaacaaaagtgcccatcactcgattcttcaccaaggaaatttggatgatacgatggattccattgtcctccctcgtgttctttcccgcaggaaattaggatgatcgctttacatatgtctccttgattcaatggtcattgctcgtgcagtcaccagcaaacaagcaatagccggcagcagagactgggagagaagaaatgctccgtgcacgttgtggttgctggaaactacgtacagcgcgcgcgccacgcaagtttatgaagaagtccatatactcaataagctttacacatcaaacttgtccatctagctaccctacacattaaaaccataagttaattaatataggtttcgatggcatagatttatcatttctcttgatctattaagcgtgtgctaagggacacgccgcgcccctcgatcgtgtcgtgtgtgcatatgcgtgcagcctatagtaataatatatatgcactgaaacagtataatcaataggtaggtgactgtcacgccccgagctagtcccgactggaattagcccgtgacgctccaaattaacctgttaatcgataccagtcccaggaaacagtgctggtatcacaggaagatagaatatcacagcaacagaggtctctttattatagagtaggagtacagtcatattgggctgcggacagatcccgagctcacaactgcattacaaaagggaaacggaagccgggacttggaccaaacaacacaggcgcgacttgggaactaggccgaaaccctaaaactcatcgtaaccggcttgctcctggaagaactcctcatcagcaggatccgcttcatcttcatcagcaactgggggggaatatttatatagagcaagggtgagtacgggagtactcagcaagccaggggaaataagtgtttaatgcaggcttcaaggaaaggctgttgttttcgtaattgattttatttgaactcttttctaaaaacatctaggtgagtgcttctcaaacgacacggttgagacagtgcgtctcatccggtcggagtatgtgcaatgcatcagtctttagaatttagacaaggttggcacccggccaacagcttttttaacggccacccgggccaacaacttttcaaacggccacccgggcctagctgatcccatcagctgcagatttttcaaacaccgaaccccttttcacatcagcaaatttcacaaagcagtagtcaaacaaaactacgctaggaatcacctcacatccgcccatgaccgtgggcacggctgttcgaacagtttgttaatctctgcagagggggtacactttacccacacgacattactaacccggatcacccagcccgtggggatcagccacgtcgggagacctccaagctttcatgacaaggcatttccaaagccgacacaggcttaccatatgccgacgagaggggtcccagaccaacaacaggttaggtcccagaccatactgtgccaggaagccccggggggtcctctccgacaccaccccggcgaatccacatgtctctcggcatcatggctcccctgataagctagttactcagctaggggtgtcccattccacccatgtggtcgtacttgtcttatgttcggatgaaattccaaggaatcggtccttaagtgcgggagcgggaaaaccgtacacccggtacgttccccggtccgcggttttagaaattcatttagttcgcaagcaccgacccaggtgtcgggttttccaaatcttttgtaaaacccaagttttacccaagttgttactcagattttaagtttgaaggcgaccgtcgatactcgcacagagtgcacgaatatcgaggcgcaactgggtggttacaaggggacatggtatagcaattaacaaaggaaggatcaaatacaacaaattaggcaggtccgccaatctgccttgcagacgggacaacagattaagtgcgatcctatcaatgcataatattttgcaagcaatataattaaatttcaaatataggctcaagatgttcaaaggtggcttgctttgctcgagatctggagcttgatcctcgaaatcctcgcactgcgggtcttcgggctccggaactacacgcgaaacgggacaactcaacaaacggcgaaaataaagccctattaatgacctctaagcgtgccattagatagatctcgagatttggggaattttggaagttgaacggagtcaacggatttacggttgggaagatattgaatttataagattattgaatttttggcctaaaggaaaaggatttaattaaatcctttttggaaaagaaaaagaaaagaaaggagggaggaaatttagactttcctcgggcggctagggtgcggcccaagggatttggggcggctcggccgagcttaatgggcggccggcccaaaaggtggcccagagcgcgcgcgggaggggaggagagaggggaccggtggaccgggctcaccgcgcgcggtcccgggtgggacccgcttgtcagcggctcggctcaccgcgcggagagagcacgcggtgcacgcgcgcgggcggggttgggacgcggtgcatgcgcgcggtccgcggtggacgcaggtgcggcgggcccacgcgcagcctcacggctcgcggtggatcgcgcgcacgcggagggaccgaccggggtcggcccgacccggtctggctgagctggcgccgacgtggcgcctacgtagctgccacgtgggctggcgggaggtagacgacgatccggccacgaaaggacggcgggcggcggcggcgagcggcggagcgaaccacggtgatacgggcaaaagcgagcacaccgggcggttgttcgtgacgaggggagacgaaccaacggctcggattcgccggaggttgctcgacggcggcggattgcggcggcggcaaccggtggcgggagaaggggaaaacggcgacgaagctacgaggggtcgattcccggcggtgagagcatctacgcggcgtcgggaactcgacgctagcgtcggattggacagaactacgccgagcgaggccggcgacgagcgggtgctacggagctcgggcggcgagcacacggcgagcgacggcaacggtcggggcggcgccggctaactacggggagtctactcaagctactaccgaaagctagtgggaggagatggagcgaggaggaagaacggagagagacactaccgtgcgggacggggcgcagtgacgagaggccgatggcgcgggagtgatctctccggcctcggcccgaggaagaggaagaagggggcgcgcccggagtccccttccgcgtccacgaacgcaccggctctcccggcgcttggcgatggacggcggaggcgaggcagagcacgggagcggcgacaacggtgaggaggcgaatgggagaggaaaggaagggagggggaagacgggtttaaaagggtggcaatgtcggtttgagagaggggaaccgacaagggcggtcaagccggcgagctggtgctccggctagcgtccaaagcggcgacaggaggtgacgccggcgagaggggaaaaaggggagaaaaagaggaaaaggagggagagaaaggggctcgcccctttgccgattcgggaaaaggaggagggagcggggcgactcggcagagggagaggggctctctgcctccgccccttggaggctagcgcgcggagtggcgggggcctggcgataacgacggcgatgacggcggggcggtttggagcggcgcgacgacacgggcgacaggcgcgggctggcgcggcagagggtgacggcggcggcgaccgggcggtcggccactcggcacgcgcgcgcgggaaacaacgggcggcgcggctgggcagcgggaccgggcgacgcggacggcgcagacgacgcggctcgggcgggaaaccacgcgggcgcgcgcgcgagcgacggcgcgcggggccggctttgcgagcggggagctcgcgcgagaggagggggcgctcggcgcggctctcgcacgcgcgagcagcgagcggggggggggggaaacgcgccgggggggagcgagagagagagagagagatagagagagagagatagagagagagagcgcccgggagagagggggccgggggagagatgggccgagcggaaatttgcccatcgaacacgggggaggcaaactagacttttgcggaggaatttgatttggagggattggattcggaattgaactcgacgatagatcggggattgaaatcttgagatggcacggacactagacaacaagcaaagaaacaaatttcgcaattagggtttttaagagataattttcctgctaggcgccacgacggaacgggcgctacagtgacatacttgacagtaagacgcatgtggtgattcttaaatcttgagacatgtcgatccaatattcgaaggtatatgtgtacatgtgtgcctttgtaattaagagtgagtgcacgcgtgattataggagtgcatgtgtacgtattatatttaaaaaaaaactcatatatgtagctcctgagaatttgaaaaaattaccttttcataaaacctaatttataagtggacccttgcaaaaactataactacaaatggacaaagcttattgctatggcccatacatcttagcacccatattctttgcgttggtccacttatttggataaaatggcttgtagatccttatatagggttggaaatggtttggttcaggtacaggcgaaacaaaaccatgcccgacctaccacctggtatcacccaccccgaaccttacccagtagggttagccgttaaaattctgtgtccgtacctatgaccggcaggaattcggtgagtctggcatgaatagtatatcattagattggtcatttacacaagaacaacaaatcaatagtcaaccaaattatcgattatcaacaataattcaaattttatcacaagttatcactagctagcatcacaaataatctccattaatttgggcattcaccaacactccaacaattcaaattaacggtattcaacacaagcattcaacagttaaaggtagaagtacaatcatccaggcaaaatattcagtataaattattactacaatgcttgcatcaaccaacactcagtgagagatgggtcaaaaacaactaatagctatatactaggtcaggcatgagttactaacgggcaaaaaataaaatccacatgctgccaactacatcgtctgggtctggagcaggcatgcatatggtaaaaataagagtaaagtgcacgagaggtccctaaacttgtgcagatgtgtcatctaggtacctaaattcttaaaatgcatttttgatccctaaacttgtcatgtcaggcatgagttactaacgggcaaaaaataaaatccacatgctgccaactacatcgtctgggtctggagcaggcatgcatatggtaaaaataagagtaaagtgcacgagaggtccctaaacttgtgcagatgtgtcatctaggtacctaaattctcaaaatgcatttttgatccctaaacttgtcaggcatgagtaactaacgggcaaaaaataaaatccacatgctgccaactacatcgtctgggtctggagcaggcatgcatatggtaaaaataagagtaaagtgcacgagaggtccctaaacttgtgcagatgtgtcatctaggtacctaaattctcaaaatgcatttttgatccctaaacttgtattggatgttatttaggtccaaatggattccaacccactttgtgtgttgatgtggcttgccatgttggcgcctatgtatgattatgtatctactcacatatcagtcatatattgaaaaaaaattaacaacatattttttctcctctcttttttaatttatatctttaaaattaaaaacatctttttctcatctctttcgtgtcattttaaattttactttttctatatatgactgacatatggatcctttgacatgtagatgccaccgtggcatgccacgtcagctcatagagcggttagagttcgtttggataagtttgaggaaaaacaaaaagaaatacaatttcagagtttaaccatttagatgatacacccatataaatttagggaccgcccgtgcacttcactcaataacaaattatacccacacacatacccatcagacctagtatccgtggatacctagacccatgggcaaaattgctatccctattaatcctatagaataataaagccttagcttggtggtgagcgcttgcatttactactctaatgacttcggttcaattcgccgacacgctttggcgctgagttttgaattttgatcctgcttttagttatagtttttgttagggtgtatttgtaaaatagatttttgcaaaaggttaaaatgtcaaaatgtcagtacgcagctcacatgcatagaaaatgttgccatgaaggttcgtcgtcaggtgtgctgaaactgtccccatcccttcattttccttgacagtgacagagccacgaatatatttgagcacggaggaggaacaatcaaaattgataacaggaaaatagtgtaacattacgatattgtgtcagcaatagagagtgttttcccaagataatggcatcgtatattttcacgtggagatagactttgatcgtttcagaaaacgatatctacctttgacgttagacgagaagcctgaataaattccatgcactaaattaaatgagtaggcatcggctctgctgatctataaatatatacgagctgtgtccgcagcaacaagagcacgagcttacctagctaggtccagagaaaaaactgatacaacgatagtaacaataacagtagatagtgtgttactactgcacggttcgtcgcaaacaatggagaatagccagatgtggcttctgtggggagccctctccgtggcgctcttcttctacttctccaccctgcgacgacgctacgccggcggcaagcccctccccccgggcccgacgccgctgccgctcatcggcaacctacacttggtcggcggcggcacgttccaccacaagctcagggacctggcacgcgtccacggccccgtcatgacgctcaagctcggactcgccaccaacgtggtcatctcctcccgggaggccgccatcgaggcgtacaccaagtacgaccgccacctcgccgcgcgcgccaccccggacaccttccgcgcctgcggcttcgccgaccgctccatggtgttcatcccgagctccgacccgcagtggaaggccctgcgggggatccacgcctcgcacgtcttcaccccgcgggtgctcgccgcggtgcgccccatccgcgagaggaaggtgggcgacctcatcgcctacctccgcgcgcacgccggggaggaggtgctcgtcggccacgccatgtacacgggcatcctcaacatggtgtccttctcctacttctccgtcgacatcgtcgacatgggctcgcagatggcccgcgagctgcgggaggtggtggacgacatcatcttggtggtcgggaagcccaacgtgtccgacttctacccgttcctccggccgctggacctgcagggcctgcgccgctggacgacgaagcggttcaacagggtgttctccatcatgggcgacatcatcgaccgccgtttggctcacatccgcgacaacaagccgaggcacgacgacttcctcgactcaatcctcgagctcatggctgccggcaagatcgatcgtgtcaacgtgctcaacatgttgttcgaggctttcgttgccggggctgacaccatggctcttaccttggagtgggtaatggccgagctgctcaaaaacccgagcgtgatggccaaggcgcgcgccgagctgagggatgtgctcggcgacaaggagatcgtggaggaggccgacgcggcgaggctgccctacctgcaggccgtgctgaaggaggccatgagactgcacccggtgggcgcgctgctgctgccgcacttcgccatggaggacggcgtggaggtcggcggctacgcggtgcccaagggctccacggtgctcttcaacgcgtgggcgatcatgcgcgacgcggcggcgtgggagaggcccgacgagttcgtgccggagcggttcgtggagaggacgccgcagctggacttcagagggaaggacgtggagttcatgccgttcgggtccgggaggcggctgtgccctgggctgccgttggccgagcgtgtcgtgccgttcattctggcgtcgatgctgcacacgttcgagtgggagctccccggcggcatgacggcggaggagttggacgtgtccgagaagttcaagactgccaatgtccttgctgtgcctctcaaggctgtgcctgtcctgatcaaatagttggacgactatattattggccagatcaattaccatactcggcaccagaattatattatttttaacgaatttgtactagtgcacattgaatagagaagaagcaaaactatacaagtataagcctacacaggagaaagaaaaaaaaattctatgctattgtaaaatgtcatataatctttttgctccgcctgagcctctttgccacttccttgatcttggtggccaactttgccgccgtaagttatttgtgcctaaagactctatagttccattcctttcaaacttgccaagccattaggaggattagtatgcgcaacctttttttttttcactcctttggtggtggcaagccttgtccaccattcgtgggctgtcgcagctgggcccaacttttcagtttgattttttccaagcgcacaacattctccaaattctctcggtatacctatattccactaggaggtgaaacaagggcgacgctagagcaagacgttggggttagtagaccccgacgattttccacaaccttcgtataccccatctatcttacagccatgatcccactgaagaaaaccattagaccctagtggatttgattagttaaagctcaattgtgattaacaactaagaatggcacaacaaaatagaaaaatagctaagctaggtcgtatgcattatgtgtcagcctaacccacataatgagataacgtttggatgtgagtccacaaggctggcagcccactaatctccacaaataactatagtgtctctcagtcttgacttctcgtcttcaggtcttctcgagtccagcatctaaggataggcacggaccggatgggcggtggaacatgcaaagactaggatcggcgaagatgagcacgagtagccgagctgtaaggttttgatcaggtaaccctttcccaatttcttaattatcatcacaaaatggctagagtgccttggtttggtcactcatgtctgaaacattaaaaaattacggttctgaaatatgcattccttttaacttattctgacttcttttacaaggtctgatgaagtaatggtcatgaacaaggaggaggattgaatcataattttattcttccagtataatagattgtaagaaattattgattttgatagtagtgggtgcttgttcatttgttgtctaatttgtgaaattgtgttactgatcaatcttgttcaataattatttaataggcaagcaaattataatgcagcaattcttgaaaagaaataaacccccgttggtgaccaagaaaattgtgatggatcggagccatatacaagatttgtaacatgtaataggtaaccactactgcaacaacactgtattttatcataatatatcattgtttattttgttccatcttatgtatagtcttagattactacaagctatagtctattgttagtatcactagttagtagaccccgacgatcatttatcctggcttcgcccctgaggtgaaaggctatcttcgaggtatgcgtactgagtggggagtaggtgtggttcaggcatatgtatgacgctagccaatcagatgtccacactttattttgcaccactagccagtcgaagattttgtttttttttaagtgcccaaggcttctaaatgatcactctatagtttgtaggtgttgaaccaagcatttgcgctttttaaactgatgctgtcgtgtattcaccgtggtttttgagcttctaagtgatctgatccgatctcgtagtgggctgcacttcttgaattagattccaaactctttaggctatgtcttatatggctggaaataagtctatttgtattcctcatgttttgggccttgccttatatggttgattaagtctattttggacccctctaccatttttcttcgaccgtgccgtgccaggccagcccacggtgccaaggcattggcctaggcacgacccagctgtaagaccgtgccatgcttgggccaaccgtcgggccttgggccttatggtcatccataattgtaccactatggacttggctgcttgcagccgttgtatctgctcctgccgcacagctgcagtgtcgcaacatgtatttagttgttctaaacatgatttttttatttggtttgaaatgtttaatttttaattttaaatacaaacttgctaacatttatttctgagatctggatatttctagctgatgtggcaaaaaaaaacactatcacatcgtggctggcttagcaaaacaatattgtcacgtctgtttgaatagcatgacctcgttatttgctcaagtcggtctaactagcatgataacgttgtctgtcacgtcaccctgaatagtgtagtaagacaaaacggtcacgcccattgcggatggcgtgacatcgttattttgttatgccagacgagttggcgtaaccaaaagatttaattttggaataagttttagaattgtttatttgtaaaataaaaaaaaattaaatgttcaaaaacaacaaaatatccccaatgtgagggccgacccattgagaatagtattggagtagtagtattgtttgtgttcgtttcattttttttcccttttgttcatgtcttcacgtgagctaaagcggtcttaatttcctattatgttttgtccatgccggtgacgcgctgggcttccttgaaccgcatgccatgctccccggccacgcgatttccacagatttgttggccagtgttgacagtcagaccacgaggaagaacggcaagattgcaaccaccgaggatatgcaaatgcgtggaagaaaaaatcgcgtttttcgacctgcgcgagacgcctctcggatttatataatcggtaaaattcagtactcggatttagtagaactaggaagatagacccacggctgctcgagcactgctcttattctcgaattgtattattattttttggttagataatagttcttcctttttaagtataaagccattatgtattatccttacaaatacttctagatctacgtgacactcaaattaattagtgaaaatccaaaagatttcgagacaaaacaaaatatctcgtccctcgtgacttaaacctatggagccattatttctaaccgttaaatccatcttatatataataaaaaaaaaaccctccgcctctacctctacctttaccttctcctcctatgtatcttattcaagcgttataatacatcacatttcaaaaagatattgcccaattatatttaggcgtccaatcatattcacactagattacgtagagcttaatgtcccatccaatcgataagtaaaaattgacaacctacattttttatccaattaaaagaagaaaacactttacttttacctgaaacataacttggtaggcatgctttctatatcaaataagtatacctcatttttagatgatgaacaagattataaataattgtttatggggactaattaaatatgcaatgctgacgaaaaaaatgtggagaaatcgtacttttgaagggagacaaatattctttgatttatattccacacttatatctcaaacataacctacaacatatacctgtatgactagttaggctatctggttattattaactagccaacaagccaagccaagtcagagtgaaaacaaatttcgtctgaaattgaataattttcatttctcgactactataaaagaagatgtttttgtcagtactttggtacgtcatccatgtatgagtcggtttttaattttgtttgattttggaaatacatattcgtattttagtcgagttttaagttcgattacttttggaaatacggaaggagtcgtataagatatctctttaaaaatctcgcatgctaacttgatctagatgatcggactccgaattatagcttatgatttttcaagcgaattcccacggtgaatatcatcttaactaaaccatataacaataataagattaaaataatcttcacctgttgcaacgcaccggtattttttctagttaaaagaaaaataccaaatcactcagaataattttgaaccgagtaacccagcgtttttttctttcagctctatttgagcttagttggcctttgcggttgcggctgtgcgatgtcgttgattagtcatcttgcagacggacaacgaaagtgcatagtatgaaaagtcgaacagatcatcaaaccggtcagtggcttggttcaccggttagggtgtgttcggacccaagggttcccaacacctctccatcgttttccgcgtacacgcttttcaaactgctaaacggtgtgttttttttgcaaaaagtttctatacaaaaattgcttaaaaaaatcatattgattcatttttaaaaaaaattagctaatttctaattaatcaagcgttaatggactgctccgttttccgtatgaagaaaatttgttcccaacctcccccagcaaacacagcctagactggtggcccgccggttaaaccacagtttaaatatgcatatatatatagaggtgttctgtgttcagggttgattgatgtaagctgatgtacgtggctgtagcgctttggctgtgcatccacaaaccgaaggagccgaacacccctatcggcgtgtatagtactagttgtaagttaatgccccaggtgtgagtcatcaatagatgctttgtttttcgaagttaatggtagcacaacagcacaagctgctttgactcttgtatgtacggttgtgcaactattcgtcctcccactcgaacggcactgctgtacatgggctgggatagcaaataacggcccatcgcccagcacggcagcgcccgtacgcgcgcgaccacccttgtcttgcgcctgagctgcgtcgcgccgcgcgccggcttggctatcccgcatgggctggcctcttggcgatggcgtgatatggaccacctctctcgatcagccacctggtcgaggaacaccactccagtgctccacctcccaggccggcggccatccgcagtagccgcggccccgcgggcgatcgcgccggtgaggtcttcgtccgcaccagcgggtagtgaagactctctcatctatgatcaagtacaccgttccaaggcacaacatcgtcgtgtttcttttttcttcaataggtatttttttactccgtctctatatatccaaccgaatatatgcagccatgcaatatctttgtgttgcttgacggaactccatccatctgtcatgctccaataccgaagggagtgttatcacttaaatttgacaactatatacgaaagagaaatatggtcgaatttgaaaaggacccggcttagcagctatcacgcctcgaactagtcccgagcggaactagctcgtgacgctccaaattaacctgttaatcgataccagtcccaggaaacagtgctggtatcacaggaagactgaatatcacagcaatagaggtctctttattatagagtaggagtacagtcatgttgggcttcggacagatcccgagcttacaactgtattacaaaaggggagcggaagccaagacttggaccaaacatcacaggcgcgacttgggaactgggccaaaaccctaaaactcatcgtagccgacttgctcctggaagaactcctcgtcagcgggatccgcttcatcttcttcagcaactgggggggattacttaaataaagcaagggtgagtacaggagtactcagcaagtcaggagaaataagtgtttaatgcaggcttcaaggaaaggctgttgtttttgcaattgattttatttaaactcttttctgaaacaactaagtgagtgcttctcaaacgacacggatgggacagtgcgtctcgtccggtcggagtatgtgcaaggtatcagcttttttgaattgatcaaggttggcatccggccaacagctttgaaacggccacccgggcctggctgatcccatcagccgcagattttccaaacatcgaacccaaaccacatcagcaaatttcacaaagcagtagtcaaacaaaactacgctaggaatcacctcacatccgcccatgaccgtgggcacggccgttcgaacagtttaataacctctgcagagggggtacactttacccacacgacattactaacccggatcatccagcccgtgcagaacggccacgactaaagaccttaaggttttcatgacaaggcatttcgaaagccgacacaggttcaccatatgccaacgagaggggtcccagaccaacaccagattaggtcccagaccatattgtgccaggaaacccgggggttctccccgacaccaccacgttgaatccacatgtctcttggcatcatggctcctccgattagctagttactcagccaggggtgtcccattccacatgtggtcgcacttgtcttatgttcggatgaaattccaaggaaacggtccttaagtgcaagagcgggaaaccgtacacccggtacgttccccggtccgcgattttggaaattcatttagttcgcaagcaccgacccaggtgtcgggttttctaagtcttttgtaaacccaagttttacccaagaagttactcaaattttaagtttgaaggcgaccgtcgatactctcacagagtgcatgaatatcgagacgcaactaaatggttacaagggaacatgatataacaattacaatggaagggtcaaatgcaacaagttaggtaggtccgccaatctgcctcgcagacgggacaagcagattaagtgcaatcctatcaatgcataatatttttcaagcaacataattaagttcaaatataggctcaagatgttcaaaggtggcttgccttgctcgagatcttgagcttaatccttgaaatcatcgcactgcgggtcttcgggctccgaaactacatgcgaaacgggacaactcaacaaacggcgaaaataaagccctattattgacctctaggcgtgccattagatagatctcgagatttgaggagttttggaagttgaacggagtcaaacggacttacggttgggaagatattgaatttctaagattattggatttttgatctaaaggaaaaggatttatttaaatcctttttgaaaaagaaaagaaaagaaggagggagggaaattagacttacctcgggcggctagggcgcggcccgagagaaaggggcggctcggccgaacttaacgggccggccgacccgagaaggcggcccaaggcatgtgcgcgggccgggaggagagaggaagccggtaggccgggtccatcctgcgtggtcccgggtgggacccgcttgtcggcagctcggctcaccgtgagcgaggtgcacgcggggcgtgctagggtttagggaggggaggcgcggcgcatgtgcgcggttcgtggaggacgcggtgcggcgtgcccacgcgcagcctcacggctcgcggtggaccgcgcgcgcgggcagggccggagggagcggcggaccggggtcagcttgaccctgtcgcggccgaggtggcaccgacgtggcgcctacatggctgccacgcgggccggcgggaggtagacgacgacgtcggccggaacggacggcggacggcggcggcgagcggcggagtgaaccacggcgatacaggcgaaagcgagcacaccgggaggttgcacgggacgaggggagacgagccaacggctcggattcgccgggggatgctcgacggcggcggattacggcggcggcaaccggcggcgagagaagggggaaacggcgacggcgcgacgggagaccgattcgggcgagctaaagcatctacgcgactccgggaatccgttgctagcgtcggattgggcggagctacgccgagcgaggccggcgacgagcgggcactacggagcacgggcggcgacggcggcgagcacacagcgagcggcggcaacggtcggggcggcaccagctagctacggggaggctactcgtgctactacccgagtctaaggggaggagatggaacgagaagggagaacggagggaggcactaccgtgcggggtgatggggcgcagtgacgagaggccgacggcatgggagtgatctctccggcctcgggccggggaagaggaagaagacgagtgcccggagtccccttccgcgtcctagcgcgcaccggctcctccggcacacgtgacggcggcggtcggcgagagggacggcaatggcgcgggcgaaaaacggggaagattgggaggggaaaaaggaagggagggcgcctgggtttatagggcggcaatgtcggtttggaaatcgaccttgggcggtcaaggcgcgagctggcgctcggcgctcgcggccaaaacggcgacagaggcggatgatgccggtggggaagaaaaaaggaaaaaggaagggagaaaggggggcttgccccttgcctctttgggaaatgaaggagggagagagggtgatgaggaggagccctgcctcctttccttggaagcacgcgcggggagaggcggggccgagtcgatgacgacggcgatgacggcggggcggtttggaacggagcggcgacacggacggcaggcgcggacaggcgcggcagaggctgacggcggcggcgaccaggcggtcggccaccacggcgtgcgcgcgcgggaagcaacgggcggcgcggctcgggcacgcggcagggcagcgaggtcgggcggcacagacggtgcaggcgcggcacgggcggcgaccacgcaggcgcgcgcgcgaagcaatggcgcgcggggccgatttcgcgggcggggagctcgcggggatggaggcggggagaaggagagcgagggggaggcgctcggtgcggctcacgggcagagcggggagagagggagagagagagagagatgggccgagaggaattcggcccatcgaacctgagggaggcaaaatagacttttgcggagggatttgatttgggaaggataattgagattagggattgaacttgacgatagatcggggatttgagatccggaatggcatggagactgactgcaagcgaggaaacaattttcgcaattaaggtttttaagagatagttttcctgctaggcgccacgacggaacgggtgctacagcagcgtgagactggtctaaccaccaccgtaggactggtcagattggtggtgtgggactggtttgaccgacgatatgtggcttatcagaccggctgagtttgactcctagtccaatttcatcgagtcccaggttttcttgcttaggctgagggttttttttttgtcctaattggtttttgcacctagtaagatatgaagagggtcatgtagaaggcaagaccaaaccttttataaggtccatggcttatttaattgagggatcaatctacttccaacactttcaattaaatcgttttcttttaatatcgcgtctactttttttctagtttctagcctattttatttatctttatcaatttgcaccataaatcgttcaccttaagagtgcgaattccctttgtaggtttgtcccaaaaccttccgttccacccacgcgacgagtgtttatctttattttgtctgaatcggttctgctagccggttttgatcttcaaaatctatcttggtttggatttatttagatcgagatggttgatgactctatatcaccacaaagagttaggtgctaaatcgtgtggcatgacaaaaaaaaaagttgtcaacaagaagttcctcttcttcgtacaccaccaccatctcgagctgcatcctcaccagtcaccaccagctaggagcactgatcttctccgagatggttgttttggttgatttaggtgaatggggcgagatgggcgagggggcaaacttgcattctacccttgtgtcgcacgcgcggggatcgctctctaccttggagatcacgcgccctcccctacgtgatgccacgcctcgccctcgtgcaagggttcgtgacacttgcagaagagtcgctcgtctctgcaggcgcgcgctccttaacgcattttcggcccgactcctacatggaagcactggggtatatgcgcaacgatggagcggtgtccatggccttaccggatccatatcaaggtactccattttgattccaaaaggctgtcaatccaactgtctttccagaccagagtagtatctgctgaaccaataatcaccattgtgaaggtcctgaataaagggattaacttgaacatgtctttccaccagaattctttatgtgcatacggagagatatcagtgtgttgataataccgacggtccgtatcatattaatactgtgaatctggatatagacttgtaatactaggatacgtccaatccgatcctatattagtatattttaggacagagcgagtatatatatttaggcaaaatttgctacaggacactcaaaaaacgtgtaattagctgtgagacaccacaaaaacgtgtatttgctataggacaccacaaaaaactggtaattagctgctggacacccgcgagattattttattatatccgaagaaattggagagagaaacaactgtgtaagtacggttctacccttcgatttttttttctttttgtttttctcaatccttctctactcctttttatttttctttctcttcttcctcccgtcatctacttctctgcctctttccagggaaccgagaggaggtagagaatggcgccggtgctccggtggctgggagacgacgacgccggcggcggagtatgttcccgagtgtggcgcaacaagggagggtggtagtaggtcgagggagtgagggaaatggccggaacggcgagtgcaaggccgttaaccgggagaagagagagaggttgggggatggttcaaagtggtggaaaagtgaaaggggaaatggatgaaatgggttctcctcggcgaggcaaggctaatggtgagaggttatggccagcggggctccgaggaatgagatcgaccggtggctggcttgacacggcatgagaagagagagagagagagcttggttttgggtggagaaaagtggagctctgtccatggattggtcgatgacggcggcgctcacacgtggtggccgtggtatggttgggcggcggaggaggaacggcacggcaaggcatcgacgctttggactgcggcgacggcagctcaaaccacggcgacgatagtggccgcctcctgctcgcgcttgtcacgcccagaaatttagcccaaatttccagactattttgtgtattaaatccctgtccaggaccagccagggtacacaaaacgacaagtaataaacaattccaaacgtaaataaagcgtaaaacacttacagaagaggcacttagtcctcacaccgaaacaaaagcagcagcagcggaaaaaggcgatcctagcggggcttcagctccactccacaggcaaaactcaactggggtctgagccttggtcctctaactccatcttcagctcagaagcactacacttctgaaaagggggaataatagcaaggctgagtacaaccaccgtactcagcaagccacaccaacgatgcagacgtgcaagggggaacacaaggacggtttgtggctatttgcataaaggcggttgtaaaacattttattgagcaaaacagtaaaactgttgagtaattaaagtaatattaaatctccactgatcaacgctacaccacgttgaacaggcccaaccaacccacctgtactacagtgcattgggtcgatttattaggtgtgagactaatcacggtgaatctggtcgatcgcccataaccgcgggcacggctattcgaatagttttactctggccagaggtgcacaactgtacccacaagacacaacccaccgacatgtcaccgcgtcatcatgtgcccatgatgcacacgtcaccatgtcgagtgattgtgacgagacccttcgcataaccctcccctaaccatccacaccacgctaaggtttcacccccacccctcaaaaggcagtgggcggtcccctcttgcgccgcggtgaatccggcagctggacaaccggacaccccggccgacccaactccatcacgcccaccctcgccaccggtgcctaggaaagggtcgagctatacttcagatcaagcagttacccattcccgcttgtggcaagcgctgtaagtcttccagggtttcccgtgaaccggtccttaattgctatgggtgcgactcgcaaaaccatgcatccacagcccaccattcagtcgcattttagttggataattacgaccataaaacatggccagatgtctcgagcacgcagctcaacaagatactagaatgtctaatactgcaattatcccatcgactgagctagtggtaattaagcatggctaagcatatagttctagctaggtcacataagtaacacaagctagtcaatttattacccaaggttgacaaagaacagatatcaagtaaacatggcgcaagcgagcagataggaaaaccctgatcccatgtaattagcaaaacatgcatatttatttgtaaacggtaaaacatttataaattgggatcaacatgctcaaggagaatgtgtgacttgccttgcttcttcactttgatcttctgaactcttttcctcgcgaccgcggacttccgaaacgacggaaactacacgctggcacgcaaaacgaggaaaaactctaataaacaccaagaaaacagtacataaaaagtaaacaaacatgtagagctcaattttagatgaattttgcaagttgaatggctcaattcggagttcgaatgaattagatatgaattttagaaggttttgagccattttaatgaatttctagaattattaccgatttattgcgcaatttaaatcaattatgacgtcatccgacgggggagaggtggcgccggcaagcgggccccacctgacggtgactcacgggtggcgggcgcaccgtggaccgagtccacgcatgcgctggtccgcgggcgcaccacgtggcagacacgtggcggccacgacggacggctagcggaggtggcgccgacgtggcgccacagaggcaccgacgcgggcggcacgggaaggccacgtggacggcccagatcgccccgaaggaggatcgggcggccacgggcgagcgggagccagctcaccggtcggccggccgggagcgacggcgcacggcccgatggtcgccggcgacgaccaccggcgcgacggcacgcacgggaggcgacgaaaagaggggaaagggaaaggagatgaagggggtcctcaccgaggagcgccggcgacgggacgaccatggggaggcgaccggcggcggaaaggatggcggcggccgacacgggaggcgacgggaacggcggtccgacgacgcccgaccatggcggagccgcggccgagggccggcaagacctagggaaattattggagcggttagggagggaaataggcgaccggagcggcgagaataccacgccagagaggagaggaatggtggggctcaccggcgaccgagaggtaccacgttccggtgggtttccggcgatgaacaacggtgaccgaggtgctgcacggcgctgcgaggcgagaggtgaagacggagcgacgcggcggcggctaaggcgacggtggcacacggctggaggcggcgtatggtggaggtggctcgggatgcacggtggaagggtggttgcggtggtggaatggggaaacggagcggaggccggggtagagcttggcacggcgttgccgacggcgcaagcggcgaggtgcggcgacgactaacgcagcggcagcggccggctgaaggcggtgtgtggcggtagtggctcggcctcgcgatgggaaggtggctccggcggtggaggagggagatggagtggatgccggggtgcggtggggtggtgtgatgctataggtggtggcggcgcagcgcggcagcgacgggagcggcggtggcgggcggctggagatcgccggcgagcggcggcgaaggggatcggcgtggagagctcggtagagggcgtgggggactcgggaaaacggggaaaaaggaagaggagtccacggggattgattttatagctcaagggggcgaggagagggccggggagcggcggatttcgaggggaagtggggcggcgtcgtgggggtgtggcggctcggcgtggcgttgattcccgcggggagagagggggagtggggcgggatgtggtcgcgaggtggaaggggtctcgggtccacgccggttgggacgaggggaggtgcgggatcggcggagggagtgggcggcgtgggcggcggttggagctggccggaggttggggatgacaggtggggtccacgggtcccacctgtcggcctgagtgagaggggaggccgggagggaggaaaagcagacttgcgccaaaaaggggaggcaagccgggccgcgggaggggaaggagagaggattttgggccgagcccgaaagggaggaaggggaagtttattttgttttctttttatttaaattgatgcaatgacctttgtgctattaaaactatttctcgagctccgaaaattcacggaaaattccggagagtacattagggcacaaagaatattacaaaatattcccggccaatgatttttaagggaaaattttaattctcccaacatttcacttggataaattgatttaacttttatttaatttctagaaaatgtattattaattgatttttaaacccgaacgaaaatcggggcgttacaaatctaccccccttacaggaatctcgtcccgagattctgggatggctagaaagaaagccggtgctggtgggcggtctgactgatctgcacattgaactgccacattctgcttcgaactgattgattgactggttgatcaaacctgcacgattgcactggctggattcgacctttctgttcctttgctttgccaaaactggaccgactggttctgcttgaactgacctaggccagaactgcggatactcctgaaacttacttatcttggactgaactgttgaggttggcaattttggtaacctgagaattcaccacgctggctataagaggatgaaaattgaatctggcatttgtaaatcatttaccctatgtccgcttggactggtcccaactcaaatgacaagtaaatccaggaaacctgcttgacctgtctaagctaagcggttgaactggcctcatgggtgtaccttagaattcaatcggttgcccggggatcggcttaattcttctgataccttgcaacttgcttcttcaagtgctaccctgattgcggcactggttgaaccttcaactaaaacagcgacgaagtgaggcaaaactcttctccgagacctaccccccttacagggagtagtcttacttccgcgtggctgggatcagttgaactgttgtccttcaaatatagccaacacttctctgatttacaaagagccctgactttgaaaactgaaaacttcatcggtccatcaaattgaagcaatggcgatgcactttcaccccgacaagatttggaacttaacccttagttgatgataggaaattccacataaaagtgactctcatttagctcatggacacactgactcttgactgcaacacactactgctggagttctttccgctacacttgaccttgcatcgagctttgcatctcccgcatcaatacatccatcatctaatcttggacaccaaatgttgatcacgagcagggttcttctggcactgggataccttgtagctttcaactgaaccattgattggtgactttaattgatcttatctctgacactgaccatccgctgccaggacggaagagaggtggaagagaggggttgctaaagataaggtactaaaccacttgcctactgttatgttgtgagtagacttttattgttcaagttgcttaagcaaacaacctagtatggtcgcatccccaccaatgatgcaaaccatacccctacacacaagcaaacaacacacgatctagaaagctaacggaactactcttctgggaaagattgggtttaggtcaacttcgggaaaactccacttgatcttcgcagaacgacgactctgaactgatcttctcgctccttgcacgaagcttgaggctcgaattgacttgacttccgaacagacatgaagctgacagctggtcctctaggtttgacaactaaaagaattggagagattgggaggagaattttgaaaaaccgtttcacaaagaaatgccgaagggcgagaggagacaatttgcaagtagggttttcagaaaacttgtccttacggtttgaccatttggctcaacctacagtcaacctggctctgataccactttgtcacgcccagaaatttagcccaaatttccagactattttgtgtattaaatccctgtccaggaccagccagggtacacaaaacgacaagtaataaacagttccaaacgtaaataaagcgtaaaacacttacagaagaggcacttagtcctcacaccgaaacaaaagcagcagcagcggaaaaaggcgatcctagcggggcttcagctccactccacaggcaaaactcaactggggtctgagccttggtcctctaactccatcttcagctcagaagcactacacttctgaaaagggggaataatagcaaggctgagtacaaccaccgtactcagcaagccacaccaacgatgcagacgtgcaagggggaacacaaggacggtttgtggctatttgcataaaggcggttgtaaaacattttattgagcaaaacagtaaaactgttgagtaattaaagtaatattaaatctccactgatcaacgctacaccacgttgaacaggcccaaccaacccacctgtactacagtgcattgggtcgatttattaggtgtgagactaatcacggtgaatctggtcgatcgcccataaccgcgggcacggctattcgaatagttttactctggccagaggtgcacaactgtacccacaagacacaacccaccgacatgtcaccgcgtcatcatgtgcccatgatgcacacgtcaccatgtcgagtgattgtgacgagacccttcgcataaccctcccctaaccatccacaccacgctaaggtttcacccccacccctcaaaaggcagtgggcggtcccctcttgcgccgcggtgaatccggcagctggacaaccggacaccccggccgacccaactccatcacgcccaccctcgccaccggtgcctaggaaagggtcgagctatacttcagatcaagcagttacccattcccgcttgtggcaagcgctgtaagtcttccagggtttcccgtgaaccggtccttaattgctatgggtgcgactcgcaaaaccatgcatccacagcccaccattcagtcgcattttagttggataattacgaccataaaacatggccagatgtctcgagcacgcagctcaacaagatactagaatgtctaatactgcaattatcccatcgactgagctagtggtaattaagcatggctaagcatatagttctagctaggtcacataagtaacacaagctagtcaatttattacccaaggttgacaaagaacagatatcaagtaaacatggcgcaagcgagcagataggaaaaccctgatcccatgtaattagcaaaacatgcatatttatttgtaaacggtaaaacatttataaattgggatcaacatgctcaaggagaatgtgtgacttgccttgcttcttcactttgatcttctgaactcttttcctcgcgaccgcggacttccgaaacgacggaaactacacgctggcacgcaaaacgaggaaaaactctaataaacaccaagaaaacagtacataaaaagtaaacaaacatgtagagctcaattttagatgaattttgcaagttgaatggctcaattcggagttcgaatgaattagatatgaattttagaaggttttgagccattttaatgaatttctagaattattaccgatttattgcgcaatttaaatcaattatgacgtcatccgacgggggagaggtggcgccggcaagcgggccccacctgacggtgactcacgggtggcgggcgcaccgtggaccgagtccacgcatgcgctggtccgcgggcgcaccacgtggcagacacgtggcggccacgacggacggctagcggaggtggcgccgacgtggcgccacagaggcaccgacgcgggcggcacgggaaggccacgtggacggcccagatcgccccgaaggaggatcgggcggccacgggcgagcgggagccagctcaccggtcggccggccgggagcgacggcgcacggcccgatggtcgccggcgacgaccaccggcgcgacggcacgcacgggaggcgacgaaaagaggggaaagggaaaggagatgaagggggtcctcaccgaggagcgccggcgacgggacgaccatggggaggcgaccggcggcggaaaggatggcggcggccgacacgggaggcgacgggaacggcggtccgacgacgcccgaccatggcggagccgcggccgagggccggcaagacctagggaaattattggagcggttagggagggaaataggcgaccggagcggcgagaataccacgccagagaggagaggaatggtggggctcaccggcgaccgagaggtaccacgttccggtgggtttccggcgatgaacaacggtgaccgaggtgctgcacggcgctgcgaggcgagaggtgaagacggagcgacgcggcggcggctaaggcgacggtggcacacggctggaggcggcgtatggtggaggtggctcgggatgcacggtggaagggtggttgcggtggtggaatggggaaacggagcggaggccggggtagagcttggcacggcgttgccgacggcgcaagcggcgaggtgcggcgacgactaacgcagcggcagcggccggctgaaggcggtgtgtggcggtagtggctcggcctcgcgatgggaaggtggctccggcggtggaggagggagatggagtggatgccggggtgcggtggggtggtgtgatgctataggtggtggcggcgcagcgcggcagcgacgggagcggcggtggcgggcggctggagatcgccggcgagcggcggcgaaggggatcggcgtggagagctcggtagagggcgtgggggactcgggaaaacggggaaaaaggaagaggagtccacggggattgattttatagctcaagggggcgaggagagggccggggagcggcggatttcgaggggaagtggggcggcgtcgtgggggtgtggcggctcggcgtggcgttgattcccgcggggagagagggggagtggggcgggatgtggtcgcgaggtggaaggggtctcgggtccacgccggttgggacgaggggaggtgcgggatcggcggagggagtgggcggcgtgggcggcggttggagctggccggaggttggggatgacaggtggggtccacgggtcccacctgtcggcctgagtgagaggggaggccgggagggaggaaaagcagacttgcgccaaaaaggggaggcaagccgggccgcgggaggggaaggagagaggattttgggccgagcccgaaagggaggaaggggaagtttattttgttttctttttatttaaattgatgcaatgacctttgtgctattaaaactatttctcgagctccgaaaattcacggaaaattccggagagtacattagggcacaaagaatattacaaaatattcccggccaatgatttttaagggaaaattttaattctcccaacatttcacttggataaattgatttaacttttatttaatttctagaaaatgtattattaattgatttttaaacccgaacgaaaatcggggcgttacagcgctccacgccgccggcctcgcgttccctccccgaccgcgtccgcctccgcgccgtcggccgctcttggcgcgcggtcgccaacctcgccgtcgacaacctcggcggcgtctgctccctgctatttttcttgtgtgtgatttcaggtggaggaagatggagccaggggcaatcttgccattccgaaaaaattcttgtctcttttgatccggatattataaaatattgtctccagtgtcctatagacaattacataatttttgtagtgtccattagccgtgtctcgtttttacagtgtctcacggctaattacacgttttttaagtgtcctgtagcaaattttgccgtatatttatagacaatatattgttggatggtaaaagtttgttgcattaaactatgatatctacaagtttgttacgtgagatgttatttgtgagtttgttaagctttaacctggtgagactattatattacacgtctttccgcgttacaagcccggcgcgatcggcaaaaccacatgtgtgtgaccgccgggccatgtgattccctccagtccaggcgaacaaagggaggcagggaggaaatatggccaaaccaagtggccggcgtgctttcaacggagcagctagctagctactccctcagttaagaaaaaaaaaaagataaaccctagattttttttctaacgtttgattgtccgttttatatgaaatttttttataattagtattttcattgttgttagatgataaaacatgattaatgttttatgcgtgacttatttttttaattttttttattatttttttaaataagatagacggttaaacgtcgaatacggaaaccttattattattatttttttttgactgagggagtagtcagctactcgtgctgtcgactgtcgtagaccggcgcaaacagcgacatgttggagaagacacgtacgagaccaggctgctgtcgcggccggccggggtggatcggcgcgcacacgcgctaccctggatagaacgaggttgcatgatcaggtgccatgccatcaggacaagctagctagtcaaagctcacacaacgcagcaaattttaatcaggacagacaactaataatggaagatgcatcgattgccaattttggagccgagaccgcaagccgtgagtttttctttctccgtttattatagagaagcagtgctcccacctgatcggtgttgtgagacgtgtcgctaatttaatgggtaacacggtgtaattttttaagaacgaacaaacataagttactcatgcaaaattaacggaaatgatttgtttgtttaaaggaattattaagacaagatcccgcgccagccgtataaccaaatattcaaacccatatgaatggtaatacgtacataggaatagagaaaactcacaatatttttatagaaacgtacatgcaaaatagatgattacaaaatacagaaaaaaaacatacgaatgaccatttggatggactacaagaaaaacacataaatttaatgagaggagttttcaagaggttggagcattttctaatttctttttaaaatctccctatattaagctattcctaaggaatttagtaggttttagaaatctacaacccttcgttttgaaggatcatttagtgcaaccttttatcggataaaaatcctataaaatttcttcataatgctttgttttaaagttttaaaagagggtttattagtgaccgagaaaagctatatatccataagatgcccagagaaacgaaaataatcggccaccattggtgcatagagacacgcacggcgtgctgtggactggatcggaggacaaccagagtaagcaattctctgttcgatcgtaaaccccttatctctcactactagaaaaaccattttcgcgggcgggggaaaaggtcttcccaggcggagatatggtctgcctgcactccaacgcctatgaagatcaacgatcttcgcaggcggacggccggtccgcctggaaatatcattatcgcaggcggactagagatggaggcgatcgcttgcgaagatagaaccagtgcgcctgggaaaaagatcccgagccgcctacgaaaataggtaaaaaatatgaaaaaaaattacaataatattttgtgatatataatgttccaattaattaattaattaattgatgcataaaaatattattaactaaagaacatttgatactgagaaatgtacatatattgcataagtggaaagtatcatcaaaatgttatattgtcacttcgaatacattatctaattacactatgccatcacgttgttccactcccaaagatgtttgtattcttcacttgtagccaggatgctctctgggtcgaagaaccgtcttttgacatgacagcactcacagtggatgaagtgacaaagatcgtgctgcacatttgtaatgcctgtatcgtcgaagcttgttcgatgttctattctaggcaactgcatgcatgaaagaagcacaaaaaatatattagtacattttagatatgcagttctccaatgcacttatatgtaattgagtcgagagacttacatcctctgcgttaaccctatatctcctaataactctgaggaattcacatgtgtaatacccacagaggaccatggcttttgtacatttgtgatgcctgtatcgtcgaagcttgttcgatgttctattctaggcaattgtatacatgaaagaagcacaaaaaatatattagtacattttagatatgcagttctccaatgcacttatacgtaattgagtcgagagacttacatcctctgcgttaaccctatatctcccaataactctaaggaattcgcatgtgtaatacccacagaggaccgtggttgcttgtgacacttgatgacatatcaaagaaggaaaagttaaaatttgtaatttgtaaaaaagttggaatacaataactttgtggactattaccggccaatatgtatgtattagcagcttctctcttatttgaatctgtctccaccattcttcttgtagtagttgtacacactgtttggattatttaccgtttcgtattaaggaggagatttaattgtaacacattaataaaatacatgcaagagtatcataatcacttactattgtaagattgttaaaaattgtttgtacgtcctgtgattataatcaagggggtcgaggacatatgtaatgatcgctacaaggtaaggaagatgcagttagtaacggatgacaaaacacagatatgataaaaaaaacctactgcacttacttaaagttgtacgcggctaggatgactcttttattttggaaatataagaaggctcgtccaatgtactgtgccacagtaatcagcttctgcttgtgcaagacctacttatattccgctatctcttcatgtgtcttacccttgagctggttggattttggtgatagcgtcacggtatgttgtgcttgacatatgcttgttggatccagatatccgatagattgctttgtcttctcagcatccatgtattgcatcctataaaagtggtatgttaataataatcatatgtttatgtattacgtcaatatatttatgtactagatgtgctctcatactcacaagcaccatgcggccacgaagtttatgtccattttttcgcgacgatagatggcgtgcagatcagcaaaatctagccagaaataaccttcgccggcgaagcagtcaaccggtgattgaattgttaaattcgttaggcctttcttgctggcatccatgtaccacttatgtagccttctcatctcccatggaccatcatcaagtgcatgatccggccaaaatgctttgccaagttggaacttttccgggcaatcatcagttgcaaagaattttggtccggaaagttcaacggtcttcttcgggtcatcttccctttccttggcgcatttcttaccccctctgaaggcggataccatccacttgtccgtttgttcatccctagacttggagttgtggtgcctgagcactctaggcacttcggacttttcactggtcttgtcatcgaccgggggttggttcacgtcatcttttgcaggtttagggtcctcatagacttttggctctgtatcgtcccattccaaacctggtacaacatcgtgttctactccgatggcttcaacaagttgcacctcctcttttggttccagcactttagtttccttaggcacatccggttcttccgtcttatctttcacctgccttttcgtaggatgtatcggaggttgagtttgaaggcaacgtctgtaggcaagcgacagaagcaacaaagcttgagtttgaatttaattactttcagacatgtgcttttgaccagtttgattacttgtgagcaaatagacagtttattggcctctgcttccgggatggatcaagatccaatgtagttgttagtgtaactagccactactacctcgtgtatgtcaccgttaactttttatctaacgtttaatcattcgtccgttaactttttatctaacatttgatcattcgtcttatttaaaaattttatgtaattatcatttattttattatgacttgattcgtcatcaaatgttctttaagcatgacataaatatttttatatttgcataaaaattttaaataaaacgaatagtcaaacgttgttcgaaaagtcaacggtgttatacattaaaatacggagggagtacaacttaatcagttgtcccagtacctcacgatgagaaagtaagggtccatatcaatatatctctgtgtagcaccatatttaactgtagcagaaagaacattattttatacatcttgaagcagtgaatttaaagtatactccatctgctacatatataatatataataactatgggattatgcgttttaaaaaaacattaaggaagtaattaaaaagcacgacaagtcataaaaaaatgaatagttggagaaataaactagtaaagaattattaggtggagaatatactactacaaaagttaaaagttgataggtgggcaataaaatattatcttgtgatcaccaaattccttatattttagaataaaacaagtaggacaaaattaactatattatgggacatgggaatatcatatactccctctccattgatccattcaataaatcaaatcttagagttaaaaaatatcccaaaataaatcaattcctaccttcttaactaccctcataatattaattgaggagttttatcccttcaataatttaatacatatactactttcctttttactacctttttattaatgagggttacttttatcttttttttctttgaagtgctaagaattagtttatttttgggatagaggaagtatgctattgtaggtgttcattggtaatacttttttctgaatggttcacacaatttctcaaatattgcacaggttaaacttttttttgctgctatgatttcattaatttgttgcacaagcgtacattctattgcaacaaagacttaatattgttgaaagaagaattttatgttttgcccaaaaaaaagaggtttttgttgcatcaacgaattctacttatttcaggatgagttttatttgttgcatatttcattcatttttagtcagttttctcacttatgtatcctcacttatgagttacgcactattggaagtgtgggaatcagggcggacctgaaattttgggggcatataggacaagacaaaaataaagggccctacaatactagtaaatactccctccatttcgaaatgtttgacaccgttgactttttagcacatgtttgaccgttcgtcttattaaaaaaaaattgtgaaatatgtaaaactatatgtgtacatgaaagtacatttaacaataaatcaaatgatataaaaaaataattaattaattaaatttttgaataaaacgaatggtcaaacacgtactagaaagtcaacggtgtcaaacattttgaaacggagggagtatatatgtaaaatatttttttattttaaataggaaaaaatgttgaactttcagacatcattaagcacaaactaatgttaggtgataattgaatagcagaaacgctataaaagaaattcatcaaatattcaaactattcaagtttataatatcttatatgtcccctataaattaaagagcacgtcatctgttagtgcaaagctaccagaggaatgactcaaccatccaagaagattgtgatgcagagatattaattaactatgaacataccgtgacaactgagaagtaataaattccaaacctattcactcagagctcctatctcaaccagtcaactatagtagctatagaaaaaaaaaaggaaattagtgaagttctatctgaattttgtgttcaagatactattaagaatagaacataggcttcaggatgagtttaattaattaatggcatcttatagagaccaattgcttaggattgccaattgagaggagaggtcaggccttcgagaggaacgagatggtttcaacgccgggcgattatattaatttcctgagcagcggcgcaactgcgcaagtactgatgtaccggtttcctggtttttgctaacgttaatgtgcttgtacgtacgtaatcagagctttacgtgtaatgaccgtgcaggctaggcagatgtattgtctacacggccgggggcccctgaggtcgtgatgccgtgtgattgcagtgctcgccttgccacagggccggccttggtgggaatcatgacataagctgttactgttgaattcaactggttatgtttcttcagtagaaccagtccacaatcgaatttaagtatagccttagacactggtgctcgtacttatgactaattattttttcagatgtgatatatcagcatggtcttagaggtgtttacagtataaggtgtacgtgtgtcggtgtttgaatagggggagtatgcctgcgtgtatctgaccatctgtgtttgcatgtgcctctaaaaaaaatcctaagtccttaatttaatttacaccacaaaattcaccgccattttgaaattttcttctttagtgtgtagatcgagttcgatatcaaatttttgtaaagcgctatatatatatatatgcttattggatcattaattattgtcaaatttttgtactgtgttcgttgggacaatcccttcaatgtgtggaaatatttatccagcttcagcagtgtatatcgaagtcatagcacacacgaaatgaccatatctaaaatgacaaagtagctgggatttctagttcaatataaaaagaacaaaagtggccatgcatgcatcgctcgtttgttcacctaggaaattattagttaggtaatacctccatattaataatatgtatgacgtcgttgactttttatccaacgtttgaccattcgtcttatccaaaaaatttatgtaattattatttattttattgtgatttgattcatcatcaaatgttctttaagcataacataaatattttcatatttgcacaaaaaatttgaataaaacaaatggtcaaacgttgatcgaaaagtaacggcatcatacattaaaatacggagggagtactatatacgatgaagtccattgtcctgtagcgcccgttccgtcatggcgcctagcgggaaaacaatctcttaaaaaccctatttgcgaaatccgtttctttgcttgttgtctagtatccgtgccatctcagatctcaaatccccgatctattgtcgagttcaatcccgaatccaaatccttcccaaatcaaatccctccgcaaaagtctatttagcctccctcgagttcgatgggccgaatccctctcggcccatctcccctccctcccatctctctctctctctctctccctctcccccaatctgcccgtgcgctgctcacgcgtgcgcgtgagccgcgccgagccgagcgccctccgccctcactgtcgcttcccgccgacgccgccgaaatcgccgcgccgcccgttgcttcccgcgcgcacgcgcgccttggtggccgaccgcctggtcgctgccgccgtcagcatctgccgcgtctgcctgcgcctgccgcccgtgtcgccgcttcgctccacaccgcccccgccgtcatcgccgtcgtcacgacccggcccccgccactccacgcgctagcctccaagggacggaggcagagctcctcctccctctgccgcgtcgcccccgctccctcctccttttcccaaagtggcaaggggcaagctccctttctcccttcctttttccttttcccctccccgccggcgtcatccgcctttgtcgccgttttggccgagcgccgagcgccagctcacgccttgacagcccaaggtcggtttccaaaccgacatcgtcgtcctataaaccaaggcgccttcccatcgattcctcctcccgtttcgctcgccgccaccgcgccattgccgcccctctgtctgacctccgccattcatcgccaagcaccgggagagccggtgcgttagtggacgcggaagggaactccgggcgctcgccttcttcctcttccccggcccgaggctggagagatcactcccgtgccgtcggcctctcgtcactgcgccccgtcccgcacggtagcgcatccctccgttctccctcctcgttccatctcctccccttagactcgggtagtagcatgtgtagcctccccgtagctagccggcgccgccccgactactgccgtcgctcgttgtgtgctcgccgctgtcgccacccgtgctccgtagcgcccgctcgtcgccggcctcgctcggcgtagctctgccccatccgacgctagcaatgggttcccgtagccgcgtagatgctctcgccgccgggaatcggcccctcgttacctcatcgccgtttcccccttccctcgccgccggttgccgccgccgcaatccgccaccgtcgagctccctccggcgaatccgagccgttggctcgtctcccctcgtcctgtgcaacatcccggtgtgctcgccttcgcctgtttcgccatggttcgctccgccgctcgccgccgtcgtccgccgtccgttacggccggcgtcgtcgtgtacctcccgccggcccgcgtggcagccacgtaggcgccacgtcggcgccacctcggccgcgaccggatcagctgacccggccagccgctccctcggttttcccccccgtgcgcatggtccgcggtgagccatgaggctgcgcgtgggcccgccgcaccgcgtcctccgcgaacagcgcgcatgcgccgcgcctccctccccaaaccctagcacgacccgcgtgcacctcgctcacggtgagccgagtcgccgacaagcgggtcccaccctggaccacgcgggatggacccggcccatcggctctctccctcctccctgcccgcgcgcgtgccctgggtcgccttcttgggtcggccggcccattaagctcggccgagccacccctttctctcgggccgcgccctagccgaccgagggaagtctaatttccctcccttcttcttttcttttcttttctttttcaaaaaggatttaaataaatccttttcctttagaccaaaaaattccaataatcttagaaattcaatatcttcccaaccgtatgtccgtttgactccgttcaacttccaaaattcctcaaatctcgagatctatctaatggcatgcttagtggtcaataatagggctttattttcgccgtttgctgagttgtcccgtttcgcgtgtagtttcggagctcgaagacccgcagtgcgaggattttgatgatcaagctcaagatctcgagcaaggcaagccacctttgaacatcttgagcctatatttgaactaagttatatttcttacaaaatattatgcattgctaggattgcacttaatatgtttgccctatcaacgaggcagatcggtgagcatacctaatttgttgcatttgatccttcctttgttaattgctataccatgttcccttgtacccacctagttgcgcctcggtaatcgtgcactctgcacgggtatcgacggtcgccttcaaacttaaaatctgagaaacatcttgggtaaaacttgggttttacaaaagacttggaaaacccgacacctgggtcggtgcttgcgaactaaatgaatttccaaaaccgcggaccggggaacgtaccgggtgtacggtttcccgctcttgcacttaaggaccgtttccttggaatttcatccgaacataagacaagtacgactacatgggtggaatgggacacccctggctgagtaactagcttatcaggggagccatgatgctaagagatatgtggattcgccagggtggtgtcggggaggacccctgggcttcctggcacagtatggtctgggacctaatctggtgttggtctgggacccctctcgttggcatatggtgaacctgtatcggctctcgaaatgccttgtcatgaaagccttaaggtctctagtcatggccgttctgcacgggctggatgatccgggttagtaatgtcgtgtgggtaaagtgtaccccctctgcagaggttattaaaactgttcgaacagccgtgcccacggtcatgggcggatgtgaggtgattcctagtgtagttttgtttactgccgtgtgaaattactgttgtggaatgggtttgatgtttggaaaatctgcggctgatgggatcagccaggcccgggtggccgtttgaaagctgttggccgggtaccaatcttgatcaattcaaaaaactgatacattgcacatactccgaccagacgagacgcactgtctcatccgtgtcgtttgagaagcactcacttagttgtttcagaaaagagttcaaataaaatcaattgcaaaaacaacagcctttccttgaagccggcattaaacacttatttcccatggcttgctgagtactcctgtactcacccttgctctatataaatttttcccccccaggtgctgaagaagatgaagcggatcccgctgacaaggagttcttccaggagcaagccggctacgatgagttctagggtttcggcctagttcccaagtcgcgcctgtgatgtttggtccaagtcttggcttccgcttcccttttgtaatgcagttgtgagctcgggatctgtccgcagcccaacatgactgtactcctactctataataaagagacctctgttgctgtgatattctgtcttcctgtgataccagcactatttcctgagactggtatcgattaacaggttagtttggagcgtcacgggctagttccggtcgggactagtttggggcgtgacaagagatggtatcagagcacaggcttggccctagggcgaaacccgacgtttaggacgaccctaaggatcctaagttcaaaactacttgcgaaaagctaaggcttctattggtttctttatttttaatagtttgttgctaaaatggttactgatcttttctccctctttcaaaattgtaaatggcagtgaacgccagcttcagttcccatggttttggtgagggtcaccacgtcgcttagcttcgtgacctcgcccgcttccttggcttctcgtgtcccgagtacacggggtactccgtggaccgtgttccccctcgctgtgagctctctgtgtacctttaccctcgtggaggtatacacggagctggccttcgcccacaccacttcactgtggccaggctcactctccagatcgcgtaccaggacctctcctggactgcgcttcgtcgcttggcccacgactacggccaccgtctcgggggctctgccttccggcagcttccacgccttccttctggccacgcagacgccaggtacccttgtccatacagcgagtctcagctagtgctgactcgcatggttgagctttcggaggctcaggccactcagcacgacctactccttgaggcttaccgctcccttgcccgccgctacgccgctctggaggcccgtctggccgaggagggtgtcacctcagttcacactatctcttgggactcaggccgcctctgccacgccagccacttgtcctcccacagctcccgcgactctgctcgcactcccagtggcccgcgctcccccagctcgcgtgcgccgtactcaccagtgtactccccctacccacacccagttagcccctcctacacccccggacacaccctagttgcttcctcccgccgtggcccacgctttatccgcactgcgcggaagcatgttgttggttcttccaccgtgttccgcttcgactacccagctcccccgccgccagcggcccgtgctactgccggccctcgacaggttccgccggtcccttcgcgtcagccgatcgacgtttcttcgactgaggagccgactacaggaggcagccaggcagacgaggagtagaggaggcagtcttcagcagccgcccgtgtgttaggcccttttgttccgccgccaactcttttggagtcatggcgaggtagtgcgtgcgtgtgtttgatgtgggtgttgtttggtagtctggttctcctaggtggtgtgcgtacagtcaagctcggcgtagctctgtgacttgtccactcccgttgtatcaggtgtttttatgatttgaaaaatccagtttatgcctagtgtgtgctatctgagttgttatttactttgctccttgccctcctaagtgcttatctgattcttacctcgccctcttctgggagtctagatggctagccgcccccgccgtgctgctcgtgcaccagcccgcttcgttttttagaaaggtagagttgagccagaagcaaatcatgagtcagctaattagcagtctcaccatagcaaccgttcgcaccatactgcttcccgcaatgcagaagttgagcagccctaccgcagcaatcgctcgcatcacacagcttcccgtaatgcagaagtggaacagtctcaccgctctcaccgcactgccagtcacaattctggagaagaacgcctcccttccccacctcatgtggaaaacaacatgcagcacttaatggcagttcagacacaaatcttgcaaggattagccgcagccatagccggctttcagcataatgcgcatggaaatggccaccctcacatgggcaacaatagatccaagctgacagactttctgaggtctcgtccgccagagttctctcagaccgtctagcccgttgaggctgacgattggctgaaggatgttgatagaaaactcaacttagtgcagtgtactcctgttgagaagacgctctacgcctctcaccagctaagaggacctgctgcaaattggtgggagaactactgcaatacacaccctgaactcactaacattacttgggatgagtttgctacggctttccgtgcagctcatgtgcctgaaagcaccatcgatatgaagaaagaggaatttaacaggcttaagcaaggcaacaacagtgtcaatgagtacctaagtcagttcaacaagttggctcggtacgcccctgagggagtggacacagacaagaagaagatcaggaagttcttgaagggaatcgcagttggaatgagactccagttgcttgctcatgacttccccacttttcaacatatgattaataaggcacttctacttgaggatgccagaaaataggctaccgaagaatacaagaaacgcaagtctaaccatcaggggaattcttcccgaggcgcacctcgccctcgctatggtcaacccatgcaatatcatcaatcggtcactcaggctaaccgccagccaggctacgcccctcgtcctcagatgaaccgtccggcacctcagccacagcagcgtgcccctagtggcaatactgcgccaaacagtgttacctctttcaagtcactgctaggaccgtcagcagttcagtgtttccggtgcaaccagatgggccactatgccagacagtgccctcagaatcctaccaacatcaactcagagcatgctaatggcagcacagccagaactcctactccagcggcagctcagtctcgtcctagctctcaggcaagtggacaaggttctcgtgcttccaacaactttggtcgaggccgggtggaccacattcaagctaagaccgctcaggatgctccagacgttgtgatgggtatgttctctgtcaactccgtacccgcaatagttctgtttgattcaggagcttcccattctttcatatcacaagcttttgtgaaaagaaatggttggaaaacccaaaatttacgtgtaccaatgatagtacattcccctgggaggaatataagggcaactcaaatatgcccggaagttaaccttagaattgaggaagttgacttcctagccaaaccgatagtcctagactcacaaagcttggacatcatcctagggatggattggttggctaagcacaaaggacagatacattgtgccgaaaggtccatcaccttgcaaggacctggaggaaagcaagtctgcttcaccactaacacccctaccgcaagtcggtctatcctaacctatttataagtcacctccttggagtcggtgcccatagtctgtgaatatcccgatgtatttcccgaagaattaacaagtatgccaccagaccgagagattgagttcgccatagaactggcaccagcaccgcaccaattgcaaaaagaccctaccgaatggcagctaatgagttagcagaagtcaaaagacaaatcgaagaattggtgagtaaaggttatgtgcgacctagctcatccccttggggagccccagtgctcctggttaagaaaaaggatggctctgagagaatggtaattgactatagagccctgaatgaagtaactataaagaacaagtacccgttgccacggattgacgatctgttcgatcaacttaaaggagcaagagttttctctaaaattgacttgagatcaagttaccaccagttgaaaattagatctgaagatatcccgaagaccgctttctcaacgcgttatggtctatatgagttcacagtgatgtccttcggactcaccaatgctccagcattcttcatgaacttaatgaacaaaatcttcatggaatacctggaccagtttgtcgtggtgttcatcgatgacatcctgatatactccaagaatgaggaagaacatgctgaacacctgaggctgataatggaaaagctcagggatcatcaactattcgctaaattctcaaaatgcgaattctggttggaccgagtagcatttcttggacacgtgatctcctccaacggtgtcgaagtagatcccagcaaggttgaggctgtacttgcttggaacttgcccaagaatgtgtcagagatctgcagcttccttggcttagctggatattatcgaagatttatagaaggattctctaagctagccagaccaatgaccgagctgttaaagaaggaaaataaatttcaatggtctacagcctgtgaggacagctttcaagaaatgaagagaaggttgaccaccgccccagttctcaccttgccagatatccgaaaagatttcgagatcttctgtgatgcgtcaagacaaggcgtaggatgtgtcctaatgcaagaacgaaaggttgtggcctatgcatccaggcagctcaggcctcatgaagtcaactatcccacccatgatctcgagttggcagccgtggttcatgctcttaagatctggaggcactatttaatcgggaacagatgtgaagtatacaccgatcacaaaagtcttaagtacatcttcactcagaccgagttaaatatgaggcagagaagatggttggaactaatcaaggattacgatcttggaattcattaccatcccggtaaaactaatgtggtcgctgatgcgctaagtcgcaagacctactgtaatgtagctcaaatatggccagaccaagatcgcctgtgcggagaattggagaagttaaggctgaccgtggtacagtcaggtgtccctgccagcttgaccgtgcagcctaccctagagtcgcaaatccgggaagctcagaaagatgataaagggataaaagaattaataaaaagaatacaggagaagaaggacaccgaattctccatagacgatcaaggcatagtttggtgcggtccacgcatctgtgtaccggccaagaaggagttaagagatctcatcctaaaggaagctcatgagtccgcttactccattcatccaggaagtacgaagatgtaccaggatatcaaggcatatttctggtgggctggaatgaagcgagatgtcgcagaatacgtagccctgtgtgacatttgccaaagagtcaaggcagagcatcagaggccagctggtctgctgcaacccctaccgatttccgagtggaaatgggaagagatcagaatggatttcatcaccggtttgccaagaacccctagcaagtacgactccatctgggtaatcgtggatcgactcacgaaatcaggtcatttcgtgccagtgaaaaccacctttgatggaaagaaactagcagaactctacatgacccatgtcgtgtgtagatttggctgtcccaagaagattgtgtcagaccgaggcactcagttcacctcaaggttctggaagcagttgcatgaagctctcggaaccgatctaaattttagtacagcttaccatccgcagaccgatggtcagacagaaagggtaaaccaaatcccagaagacatgctacgtgcatgtgccctggatttcgaaggcacttgggatcgttgtttgccgtatgctgagttctcatacaacaacagttatcaggccagcattcagatgtcgccgaatgaggcaatgttcggaagaaagtgccgcactcccttgtgctggaatgaggtgggcgaagcactggtattcggtcctgacatgctcaaggcagcagaaggacaagttaagctgatccgagaacgtttaaagacagcgcagaaccgtcagaagaattacgctgacaatcggaggcgtgaccttgagttcgaaaaaggagatcatgtgtacctgcgggtatcacctctccgtggtatgaggaggtttgggatgtccggcaagttaacaccccgctacatcggcccctacctcataactgccagacgtggcgaagtggcttatcagcttgagttacctgaaggtctcgcagatgtgcacaacgtgttccacgtgtctcagttgaagaagtgtctccgtgttccagaagaacaagtccccatgggtaatatcgagctggaaaagaacctgacctataaggaaaggccgatcaagattcttgaagaggcagaacgtcagacccgaaggaagaccatcaagttctacaaggtccaatagagcaatcattctgaagatgaggcaacctgggaaagagaagatcttctccgcgccgagttcccggagctgctcccttaggtgctgaatctcgtggtcgagattcttgttaggggggttggtctgtagcgcccgttccgtcgtggcgcctagcgggaaaactatctcttaaaaaccctatttgcgaaatccgtttctttgcttgttgtctagtgtccgtgccatctcagatctcaaatccccgatctattgtcgagttcaatcccgaatccaaatccttcccaaatcaaatccctccgcaaaagtctatttagcctccctcgagttcgatgggccgaatccctctcggcccatctcccctccctcccatctctctctctctctctctctctctctccctctcccccactctgcccgtgcgctgctcacgcgtgcgcgtgagccgcgccgagccgagcgccctccgccctcgctgccgcttcccgccgacgccaccgaaatcggcgcgccgcccattgcttcccgcgcgcgcgcgcgccttggtggccgaccgcctggtcgctgccgccgtcagcatctgccgtgtctgcctgcgcctgccgcccgtgtcgccgctccgctccacaccgcccccgccgtcatcgccgtcgtcacgacccggcccccgccactccacgcgctagcctccaagggacggaggcagagctcctcctccctctgccgcgtcgcccccgctccctcctccttttcccaaagtggcaaggggcaagctccctttctcccttcctttttccttttcccctccccgccggcgtcatccgcctttgtcgccgttttggccgagcgccgagcgccagctcgcgccttgacagcccaaggtcggtttccaaaccgacatcgtcgtcctataaaccaaggcgccttcccatcgattcctcctcccgtttcgctcgccgccaccgcgccattgccgcccctctgtctgacctccgccattcatcgccaagcaccgggagagccggtgcgttagtggacgcggaaggggactccgggcgctcgccttcttcctcttccccggcccgaggctggagagatcactcccgtgccgtcggcctctcgtcactgcgccccgtcccgcacggtagtgcatccctccgttctccctcctcgttccatctcctccccttagactcgggtggtagcatgtgtagcctccccgtagctagctggcgccgcctcgactgctgccgtcgctcgccgtgtgctcgccgctgtcgccgcccgtgctccgtagcgcccgctcgtcgccggcctcgctcggcgtagctccgcccaatccgacgctagcaatggattcccgtagccgcgtagatgctctcgccgccgggaatcggcccctcgtgacctcatcgctgtttcccccttccctcgccgccggttgccgccgccgcaatccgccgccgtcgagctccctccggcgaatccgagccgttggctcgtctcccctcgtcctgtgcaacatcccggtgtgctcgccttcgcctgtttcgccatggttcgctccgccgctcgccgccgtcgtccgccgtccgttacggccggcgtcgtcgtctacctcccgccgtcccgcgtggcagccacgtaggcgccatgtcggcaccacctcggccgcgaccagatcggctgacccggccagccgctccctccgttttcccccccgtgcgcatggtccgcggtgagccgtgaggctgcgcgtgggcccgccgcaccgcgtcctccgcgaactgcgcgcatgcgccgcgcctccctccccaaaccctagcacgacccgcgtgcacctcgctcacggtgagccgagtcgccgacaagcgggtcccaccctggaccacgcgggatggacccggcccaccggctctctccctcctccctgcccgcgcgcgcgccctgggtcaccttcttgggccggccggcccattaagctcggccgagccgcccctttctgtcgggccgcgccctagccgcccgagggaagtccaatttccctccctccttcttttcttttcttttctttttcaaaaaggatttaaataaatccttttcctttagaccaaaaaattctaataatcttagaaattcaatatcttcccaaccgtaagtccgtttgactccgttcaacttccaaaattcctcaaatctcgagatctatctaatagcacgcttagaggtcaataatagggctttattttcgccgtttgctgagttgtcccgtttcgcgtgtagtttcagagcccgaagacccgcagtgcgaggattttgatgatcaagctcaagatctcgagcaaggcaagccacctttgaacatcttgagcctatatttgaactaagttatatttcttacaaaatattatgcattgctaggattgcacttaatatgtttgccctatcaacgaggcagatcggtgagcatacctaatttgttgcatttgatccttcctttgttaattgctataccatgttcccttgtacccacctagttgcgcctcggtaatcgtgcactctgcacgggtatcgacggtcgccttcaaacttaaaatctgagaaacatcttgggtaaaacttgggttttacaaaagacttggaaaacccgacacctgggtcggtgcttgcgaactaaatgaatttccaaaaccgcggaccggggaacgtaccgggtgtacggtttcccgctcttgcacttaaggaccgtttccttggaatttcatcggaacataagacaagtacgactacatgggtggaatgggacacccctggctgagtaactagcttatcaggggagccatgatgctaagagatatgtggattcgccagggtggtgtcggggaggacccctgggcttcctggcacagtatggtctgggacctaatctggtgttggtctgggacccctctcgttggcatatggtgaacctgtatcggctctcgaaatgccttgtcatgaaagccttaaggtctctagtcatggccgttctgcacgggctggatgatccgggttagtaatgtcgtgtgggtaaagtgtaccccctctgcagaggttattaaaactgttcgaacagccgtgcccacggtcatgggcggatgtgaggtgattcctagtgtagttttgtttactgccgtgtgaaattactgttgtggaatgggtttgatgtttggaaaatctgcggctgatgggatcagccaggcccgggtggccgtttgaaagctgttggccgggtaccaatcttgatcaattcaaaaaactgatacattgcacatactccgaccagacgagacgcactgtctcatccgtgtcgtttgagaagcactcacttagttgtttcagaaaagagttcaaataaaatcaattgcaaaaacaacagcctttccttgaagccggcattaaacacttatttcccatggcttgctgagtactcctgtactcacccttgctctatataaatttttcccccccaggtgctgaagaagatgaagcggatcccgctgacaaggagttcttccaggagcaagccggctacgatgagttctagggtttcggcctagttcccaagtcgcgcctgtgatgtttggtccaagtcttggcttccgcttcccttttgtaatgcagttgtgagctcgggatctgtccgcagcccaacatgactgtactcctactctataataaagagacctctgttgctgtgatattctgtcttcctgtgataccagcactatttcctaggactggtatcgattaacaggttaatttggagcgtcacgggctagttccggtcgggactagttcggggcgtgacatgtcctccctcctgtttttcccgcaggaaattaggatgatcgccctatatatgttgattcaatggtcattactcgtgcactactcgccaaaaaaatagagatcaactagcttatctagatagcagagactgggagagaagaaatgtcgtgcgcgctggttgttgggcgggacactacgacagcgcgcggcatgcacgcggtgcatgcagaatttatttaaattttgaatatttctgagtttatgagaaatgtccatatttacttatattttgcatgaaacttattctctagcatcttaaacattaaaagcatacatctaacttctgaactttttaatatcattcacatacgtaacctataaagtgtttttttattaaaaaatacttatatttttgcgggaacgcatcctatgtacctaatctttctgtgcacaccaactaacaaatctctactacttaaaaaatccgtaatggtggtcttgattcctggcacagcagacgcatctgatagacatgcgtaatctcgatcatccgattgccacgtccaacgaccgatctcctccccacgctcgctcctttctcggatcgatctcctccccacgccccctcctgcaccctcctccctgcgtcgcctcctcaccccgccgtcacgtcgcctcctcacctcgccccagccggcgacgctgccgctgccgctgcccacccgcaaccaccgccaacgccgctgccaaccccctccccaaaccctaatctcttcctctcctcccctcacgcgccgccgcggatgctcttgccgtagtgttgtctcgccatcgtgtcgcccgagcagggtggagtgggcgaggcgcctcctgccttgctttcttttaatcgggtgttcaattttttttcctcacaggagcaggatcgagaacgagaagacaagtttcgattcgtttgttctcgaggtgtgtgtttgtcacccaaaccctagattacatcttctctcccttttagtttcaatctatgttcttgcaatagctttggttttgttacgcttgaacgatctgtgccttgttgatttctgtgagaccgatgctaaagtcacttgaagcaaatagagtaactgattttccccgtaggagattgaggctgttatttccaaatcttaggttcggctgtaaatactgaactactgatgcgattttccattggatgaaattgaatgtaccctgatttctgagatgctgggctgcacagctcactatcgatgttgagcatttcttcgtagtgatactgacgttgcaatcaagtagaaataacctgttaactaatgcttgccttagctctgcctcccttaattattcttaattatttgtactagacatttatctgaaccaaatttaaatagcaaatctgagtaggtttctttgttatctagacatactcatggttcatattgctttctatctttgtttcagttttgctgcttatattatacattcaagtttttatgcttttgcttggcagatgagggacaatgcgttgacctgaaattttacgcactccgacctcctccatcggctgcgctgccgctcaacctatgccaccgccggatcgacgggagctgtcagctgctccacctgcgccgtcatagggagccacacgaacaacctcctccattggctgcgccgccgctccacctgcgccaccgatggatcgacgggagccacccgctgcccccctcccctgcacctccacctggtatggtgtccaacctaacttaaagctgatggacattgtttggtttcaccgtctaatagtgctaaatcctccctatatatctgaatagttcatctgtctcttacggaaaaaaaatgcatgctttcttgcgtctctatctatagttctatccagtagaggtaatttgaactgatggagaatacatttcatatgtggatgtttgtcagtacatttgatgccatcgttataaaatctgtctttttctgctacagcatccactccttggatatgtctgagtgtttccatgtgcactgtttttttaatctcatttcagtttacaattgattattttggttcctctgaattgtctagggataaattgattgagcagcttcaaagtaggcgccttcctccgcatctccgctccgctctctccccttcgaccacctccaccaccgtcgcacaccgtatcgcctctccactctctccccggcaactgcgaatcgatcccggctggaggcgacttggttggcgactagactcatccctcatgccatctacctctccaatataatatagtcctaggtaagttctgctgaatgcatatgctgccatgttttatcttcaaaataacaattaatatatgttgatgcatcacgtaaagttgaaaatcatcctaatagaattatatgagaaattacctgaatgacaactcagagggtaaggctgtattctttacatgatgtcgcatgcactatatttgacacagtagatcaacaacaattaaactatattgtatcaaaatgacaaaggaagatggttagtccaactataatccatcctcacttaaaagattaaccttttctgaatagtgctttcaataatatccaaggttagtaatgaactcttttcagctgacagtatgcatacttggttgcttctagaagtaataatttatatatagttttgttcctataactgtttaggatcaactaattttgttccaccactgatttgatctcattggttcattgtttccaattccataaggcacatgttaggtggttattgacagccacaacactagatatagtgtgttttaatgctgcaatctaaattaatatgttcatatcattttgtatatcctcagttctctattgcctctctcagacggaataggatgaatttcatcctatttcataatctatatacaagaacaagatgagcaagcagctaatcattttgttaaagagatgcagagattctttattttttgtgtggatatgaattgaatgagggtaatattaatatcttattgatgttcccaaaaatgtagtgcacaattgttgtacaaatgaatacattttttgatataaggcggcatggtgtggaggcataggtcaacatgagaacaatagtctgcccactatatgttcattatagtgttttgctttgataagagattttgaccatgctgaccatttattgctttttacaggcatctgatttctcggtaatcaagtatggaggtgaggaactttaacgagaagctggttgaataaaatttctaccttattactgaggtacatttccatacattgctatgtcgatcgttattagtgaagggggtgctacaagcactttgttttcttctttgtgatgaatttgatattgttctccaatacttaggtaaacaagggcgtgtacttgtgcttcttctgaaacttaatgaatggctgcctccactgcttgaggtaaaaaaactcttagttgttgctttataaaataaaatctatgttgccatcaattcttgctatcacggtgaaagggccggctatcaagaacaacacttacatagatgtactatactcaagatccttttgtgattgtttgaaaattatattcatggttattatttgacttgattcttattttcatggttttaaacacatgcactaaaatcagcttggagtaatgggatataagcaggagtttatgtatccaaaatatttaatcagactgtgggatatgctgtaaatttgagctggtctacctctgttcatgggttaaaagtcatggatgctggtgttagcccagatgaaatagcatcattgtgctctactgtatcgggattttcccttgaatcctggatttgctattttgttttgcttccctcaaacaattgtgtccgatgttataatctgatatatcatgatatatcatagtttatcacgtgatacacaggtacagtataagctgcagtgccagatttggacatcttcagttgtgggacttgataaagcttggagatcatctcggtgaacgggaggatgttgatccatgcagttgtatgttcacctgtgttctgttatacaactaatatgcagtgatagatgcactgtagtatatcatcgtcagatcttacttcaaagaggatgggagctatctgtgcagataggttgacaaaaaattgcatgcccatgttcagatttcagaatcaatacatgtgcaagtttaagactattaaagttcagaacattttatgcatgacatcacacattactagcttaatttatctcaaaacgcaggcctgcacaagcccaagttttagatccaaaccataaaactgcaaaattttgtttgccatacaatctgactatattctaattgcatactttctataattcgctccccaaaggcaatctattattaatcattaaatccattgtatatgctttgcaatttagattgtacaattcatagtgttatagttgattgacatcatttgaatgttttgagagtaactattattgtaatcatacatttacagaacaataatgcacaagtttattatgttttcacgttatttaagacccgttgcaacgcacgggcatcatactagtatcatagaaaattctataaaaaatttggacacatactttcaataacattacacttacgtgtgaaatcttattttcaaattcattatattttagccgtaacaaaaaaaaaagacataattttgacatatttttacccttaaaactgtcagattttttacttttttgtcacggctaaaatataatgaatttgaatatgagaatttacagatatgtgtaatactattaggagcaaatgtctagtttttttagaatttttcgcggtatttgttagttggtgtgcacgtaaagtttgtgtgcataaaaataattttctattttttcatgattttgatatatgaaaaccaacctaggtgccggcgtcgccatcctaccagggcggagctcggctcggcttccgccaccggcggcagtggtggtgggctggacggtgctgttgcagaataatggatgattttcttgtgatggagttgtagatctatggtttgtaggttttttttaagatgtttttgtgaatttgtggatgattttgttgttgagtatgatttggtgaatttgtggatatcaatacgatatggggatttggggatgttgggagcaactggcatggttcgaaatcaatatgcaagtagaaaaaaacaataaaaaaagaaaaaaaacatttatcccggttaataacagcaaccaggactaaaggcatttttagtcacggattagaggaagggttacaaaccaggactgaagaccacttctccaccagtgacgtaattacataattacatttcaattatactatggttagatctgaaaatttttcactcaaaaaacttatggtagattttttaaagatgctctcctagtataaacatctcctccaaacatgcacataaatatttccttgaaagttattcaggtttggtatttgataaccgtccgtatcacttcattttccttatcagtgcaaagccagaaaatctattaaatacataggaggaacagtccaaatagataaaaataaaagagtgtaattttgtgtgatgagcgtccttccatcgtgctaacatagttgacttcgagaaatttgtatatagtttctcaacaaaaagaaaattttgtcctcttgtgccatcgcaaaaaaagcagttcggtataatctctcgctggaataagttttttaaaaaggtcattttcaactgtcatcctcgatcattttgtcttgtactgcttcttctttgcatcatgcaagtaggggtgaaaacgggtcaggttcagttggatttcacaattctcatatgctaacccatattttaaaatcgaaatcggtcgaacacgcatagcgccgaacacggatataaactcagataatatcggacaaaaatatgaaacgaatacgtaccaaaatagatatgaacactatcggttacgaatatttattcggatatcaagtcgaagcaacaattttatatatcacatagtcaataaccatttaacaattccatatatccataatacgattatattaggctattaggaccttaagaaataaatagggtacaatacatcatagtagaaccaatccatagtaccaaaaagtgcctcacaaaaacataatacgggtaatatccgtataattatccaggcatacccggatttttttatcggatactacgtttccgaacccgatctcatatccgccaaaaaagacccgatatccgtgaaaagtcccgggtacctgactttatcccgaaattatgtggccagatgggcgggcgggaaatacccaccccgttttcacacctacatgcaagtatatatgagaatccgtgttcacatttgaccgtcgatcttattcgaaaaatttataaaagttgtccttgtgctgcttcttctttgcatcatgcaagtatatataccgactctgttccaaaataaatgcagccgtgagaatccgtatccaacgtttaaccgttcatcttatttaaaaaattataaaagaatttaaaaatagtcacacgtaaagcattatttatgttttatcatctaataacaatataaatactaatcacaattttttttaaaataaaacaaacgatcgaacattagatataaccagtgtaaaattgtatttattttagaacagatggagaagttggaagtcaggaatagtgtgaaacgtaaggtcacgtgtagagaaactttgatctttttttttctttttacgaaaacgacatgtatctttgacgttttgacgagaaatggaaataaacgccatgcagtaagggtatattctaaacttcggctaagtttagttacaaactatttctttaaacttccaatttttccatcacatcaaaacttttctacacataaactttcaactttttcatcacatcgttccaatttcaactaaacttttaattttaacgttaactaaacccacccttcaactcgatctataaatacatgctgcgggcgcagcgacaagatcaccaggtagaaccagagaaaaagaacattaacgataagtaaagtaatggagaatagccaggtgtggctgctatggggagctctctccgtcgctgtcctcttctacctctccaccctgcgacgacgctacgccggcggcaaacccctccccccgggcccgacgccactgccgctcatcggcaacctccacctggccggcggcacgttccaccacaagctcagggacctggcgcgcgtccacggccccgtgatgacgctcaagctcggcctcgccaccaacgtggtcatctcctcccgggaggccgccatcgaggcgtacaccaagtacgaccgccacctcgccgcgcgcgccactccggacaccttccgcgcgtgcggcttcgccgaccgctccatggtgttcatcccgagctccgacccgcagtggaaggccctgcgcgggatccagggctcccacgtcttcaccccgcgtggccttgccgccgtgcgccccatccgtgagcggaaggtgggcgacctcatcgcctacctccgcgcgcacgccggcgaggaggtgctcctcggccaggccatgtacactggcctcctcaacctcgtgtccttctcctacttctccatcgacatcgtcgacatgggctcgcagatggcccgcgacctgcgggaggtggtggacgacatcatctcggtggtcgggaagcccaacatctccgacttctacccgttcctccggccgctggacctgcagggcctgcgccgctggacgacgaagcggttcaacagggtgttctccatcatgggcgacatcatcgaccgccgcctggctcacatccgcgacggcaagccgaggcacgacgacttcctcgactcgctcctcgagctcatggccaccggcaagatggagcgtgtcaacgtggtgaacatgctgttcgaggccttcgtcgccggcgtggacaccatggccctcaccctggagtgggtgatggccgagctgctccacaacccggccatcatggcgagggtgcgcgcggagctgagcgacgtgctcggcgggaaggaggccgtggaggaggccgacgcggcgaggctgccctacctccaggccgtgctgaaggaggccatgaggctgcacccggtgggcgcgctgctgctgccgcacttcgccgcggaggacggcgtggagatcggcggctacgcggtgccgaggggctccacggtgctcttcaacgcgtgggcgatcatgcgcgacccggcggcgtgggagaggcccgacgagttcgtgccggagcgcttcctggggaggtcacccccgctggacttcagggggaaggacgtggagttcatgccgttcgggtccgggaggcggctgtgccccgggctgccgctggcggagcgcgtcgtgccgttcatcctggcgtcgatgctgcacacgttcgagtggaagctccccggcggcatgacggcggaggacgtggacgtgtccgagaagttcaagtctgccaatgtgcttgccgtgcctctcaaggccgtgcctgtcctgatcaaatagtcggacgtacgactatattgttagccaggtcattaattgttccagagtactttggtttcactatatatatacgggacccagtggcacgagaataatatgcatatgcatatatatgaataagattttgtctacgtatatccaacttgcaattttagacgttggatgaagatggttcagtgcagaaacttcttaagacactcgtatgaaaaaaatcgattttccattcggccacttaagaggtccgcatacaaaaaaaagagctcatttttacatgaggacctcttaagtggcctgtatggaaaaatcatacgggcgttttaaagagccgtatgcgaaaataaaatttgagaatttaaactagtttatctcactcatataaactctaaattggatgattatttttcctaaatatttctaaaatcatactctatcatgttattataggatcgaacacgagaatggtaggaaaaaccaaaaactaaaaaaacttttagcggaaataaaagttaccctcagattgatggagatcttgacgttgtccaatcgctgccggtcacacctctcctaagctgtcggtccaactgccgtagcctgtccggtcagaccgctgcactgccttcggttagaccgtcgtactcccactggttagaccgccgccttgccgtcagtcaaaccgtcgagatctagaaaacacgtatcgatgaaactcttgaaagtatatcaactttattgtatcaatatgtatttacaaagtgcacctaaaacactcctctctcaactcacggattaggattgaaaccgcgaagtaaactctaacttttctctcaaaaaaaatggcatactttcagcctcaacccctcatctatttataaaaaaaaacacttaaagtagcaggcgtagaacttttatttccagtaggacccaatccatcactttccaatccaatcacaatttacaaaacccgcagccgaagatgccgcatccgagtctcactcggtctccccgagcgcacgtcattggccatctcggcttgccagccaatcgagcatccttgccgcatggaccggctgggcctgcacggcctgcctccatgcacacgccaagctagcttgctcgctgctccttgcatgggcctgctcagcctgccatccaacagagccaccagcccaagcaactagctgcacatgtacagcaccgtacatgctgcatacctgcacgctacagtacctcgtgtactgtagcatcatatacttctcaccgatttcttccaatctccttcgcaaacaccgacgcttgcacgcacacctcgtgaagcacgccgcgaagatcactcccatatggtgtacatccaccgtgtgccatctcgtatccaatttcgtcacccggtacccttagccgtctggaccttaactcctccctgagtctagtcccgatctgtggacccccgtttttataacaggaatcattcgtgtaaacagtaccattttcctggatcaagtagtctggtacacacgagttcatagctgaaataccaaaagcacatacacgagagtctagtgctaattattacatcataagcccgcaggcattgtcttaaatcatcggaccgagcggtccggaatacatccaaaatgcagaaatagataaggcagcggaattcaggcagcggcatgccattgccacaggcaacgaccgtactaagacctactgagcgccatcgtcttcatctccctcctggtagtaggcatagggatcctccaaagcttcatcccccgcttctgattaattttatatttgcaagggtgagtaccaaccatactcagcaagtcaccacagcaacaatgcatatgaaaggggtatttcaaaggatggctatggctcttttgcgctatgccagttttgtaattcttttcacaaacctaagacctagcattgactgatcaaattttagtaccagcgtttgtatttaaacaacgacggttctgtccaccatccattgtgatcccaaggatagcttcccgccattgagtcgttatggttttctgaggacgtccaccttccctcctctcaggaagtggctccatcagtataaaaatcatcatgcaatatcccatcccacacaggttaagaatttagagtctagccaagtgtaatacatgtcccggtgctcaataaccgcgagcacggctattcgaatagatttggtttactcacactgcagtggatgtacactttacccgcactccgcgactgcccaacacatgagccttgtcccaacacatgagacgcgtcacgacaaagcttttcgataacctcgcattggcagtacctactacatgaacttaaatcctcatgcactctaggcgtccatgtttctagtagtgagaggagttctggcgctcccggaaaagagaagtctcaaacacatattaaattatggttcaagttaagttctctctcacacacactcatggcagtcctaccaatggcgacaccgatgtagggcacgcctctcggccctacctcaacggctgtcccaccgtagcgcacctgcctcactcaggggtgaaccatctatgcagggatactgcctccgctcggctatctaatccgctaggtctatacccatacgagaagtgcggttgtacgggggtcgtttcatgcttaacttcatggctcggtccttaattgaccggggacggcactagccttttccagataccacccaaatcctccgtctgccccagtcgaaaacagttgtttaattttatttcttctttcacaaatcatgtcatcaacatcatgacaatgtggcgctcatgtctccacatgccgcatctcaattaccttcccaaaggtaattgcccaagcatatagcatttgataaatatgagtatgcatgattctagaatagcatttctaagcaattgtcatagttgactagggactcatacgtaaacatggttacaaagatttaagggtaaacaataatcaaggcatggcataattacaagtgggatgttcatcattgcatgcaattttatttgtaaacaaaacaatttcgcaattgggatcaacatgttcaaggaatggtgatgacttgccttgctcaaggtcttgcgggtcttgaccttcgcttggatccgcaactccctcaggctctatagttacgtgcgaaaattgatttgaattcggttagaattcaaataaaaatccaaatgaatccaaatgaaagtcgaatgcgaaagtcgatttctttatattaactttattattcgcgaactaaggcaaacccaatttcgattcaaactattttgcgggtataaatattttgttgtcataagtttttaatttaatctacccgagcattatatccatataataggttagaaatttctatcgcgagctaaatatcggacggaatcctagaaatattatacgatttaatttagtctatgactaaatgattaaatataatacacgggtaaaatccctagtagttaaatccaaatttctaccgtgaatcgattacttataggggttacccataaataatctataataatccataagaattcatctatttgtttagttattaactacatctaaattattaccgcgaattgatttcttatagaaattgccaagaataatccataatttatattaaattttgcaattttacgactataattaatctataattaaattccaattattttaaattttataaacttccctaatctccctctaatttctttttatttttatatatatttttttctttttccttctctttctctcctttcttttctttttccttctctctctctcctttctttcctttttccttctctctctccctcggcttctcccttcctctctctctctcggctctctctctccctacccgaggcggcggtggcgacagcacgcacggaggggggggggcggcggcttaccgacggcggcgacggcggcgcaaggcggcgacgcacggcgcggcggctccggggcaacggcgcggcggcacgatggcggcggtgcgtggagaaggaggagagggaggggaaatggaggggatgggtgtgggatggaaaagggaatggccgagttttataagggcacggggaaggggcgggtggcctaatggcgacgcgacgggcggctcggctggcggtgatggcgacgggcgggcggtgatggcaacgggcgggcggcgcggcgcggggctcggcgcggctcggcacggggttcggcgcgacgacgacggcgacgcgacgggcgagcggcgcgtcagtagcgcggggctcgaggcggcgacgcgatgggcgagcggcgcgcagggcgagcgacgcgacggcgggacggggcttgaggcgacggcggctcgcgcggcgcggcagcgggatggcgatggggatggcgtggcagcggcggcgagcggctcggagcgacgatgggacgcgacggcgacggtgcgcggcggcacggggcgcgagacgaagggcgcgcggagcgaggtggcgcagcgcagcagcggcgtggcagcggtggtggcgacggcgcgcggcaacgcgatggcgatggcgcggcggcggcagcgcggggctcggggcgtggccgggcgcgcggcagaggagggtctagggctaggggaccacgtcgagcacctagagtgcaatgaacagtgtctttttcctatttttctcattttagtctatttcttatataaatttggttccacaattcctaatttttgcacatatgcattttactcaatatttatgttatctcaactaatgaactcaccctagattaatattactcatattttatttatataatttatttgaatttttaattagggttaattcttattccatcgcattttaaatttaattgatccaaacatggtcgcgataatattttatttatttctatccacacctaatctttattttaatttatatttattttaccagtttgttttaaggtttattcctaattaactatctttactcacgattaatgaacttcgaaatcaaatccaaataaaataggcgaataagataggcatggtgcaattaatttaaaagtttttttttggaaatccgtatttttagagttttgattttgtcggtcgaattttcaggatgttacacgatcccacaattgaccgaagttgacctccaagaatcctgactctagtcaccttctcacatgctatcccgaccgcactagacctttgttccttcctaaacatagtcccgatttcaccactgaccaaggctgacctcaagtcacctgtacacaatcagacaaaacgatcgtttctgggcacatatatcacaacctggcccacattattcatacgcactcacaccaacatccacacatcttctcaaaccaattcatcgaataaatcatttgcatagccagtttgttcatcacaaaatattaatcatgacaatgatttcatagttattgtgttcttactgctattattttagccatttttttgtgacttttttttatcaattaaaattttgaatttcaaaacttcaaataatattttggagcagtaaataatttcagctgaaaaagtgatcaacataaaagatgtagaactcatgcattaagacaaacaacttttattttggtcatttcttcatccgacaaagtgataataacattgttcataaaatttacatatctctcttatagtatataaaatcatatgagagatatgtagattttgtgaacaatattattatcactttgtcggatgaagaaaatgatcaaaataaaagttatagatcttgatgagttatacaattttgttgtcggtgactttttcatttgaaatcatttagtatttaaaaatattgtttggagttgtcatatttttaaatttaaattcaaactgttgaaacaaagccatatagaaaaatgaccaaaacagaagttgtagaacatgacgtgttatacaacttttttgttgtcaatttttccatttgaaatcattttacttcccgattttttttaaattttttatattttaaaattcaaattctatatagttctattaaaattggatgtagaaataaccaaaagaaaatcggtagatctcaatgagttctataactttgtttttttacaacgttttcaaataaatttatttagtatcataaaattcgattcgaagttctcatattttcaaattaatttttttattgactattttcgcatgcgatcctcttaaagcgccgcatgcaaaaatatattttcacatgcggacgcttaagtgtgccgcatgtaaaaattctcactctttctttcactcctcctcactctttccctcctcaccacttcaaaatttttcaaccatctcttttatttctctctttttctctcctctcctctctctctctttcttctctcctctctctgatggcatcgacagagggcatggagatggtgtcagcgggcagcgagggtggtggatctagcggcgccgccctcgggaaggccggatccgttgccctagggacgagctcagcactccgtggcggaaggcgggcacggtgacggcctgcggcggcggatccggcggcgccatcctcgggtgggtcggatctgccgccctagggaggagctcagagcttggcggcggggggcggatacgccgacggcctgcggcggtgggtctggcgacgccgtcctcgggagggctggattcgccgctctaaggaggagctcggcggtgcgcggcggacacggcgacggctggcggtggtggatccggcggcgccgtcctcgggagggctggatccgccgccgtagggagcagcggcggctatggtgacggcgaggagctgcggcgacagtgttggcgggcggcagcggcaggcggcgagggcggtggatccggtgacgccgtcctcgagaacgccggatccgcggccttggcgctcgtcggtgggcggcgggcactttgccgtggcggcgcctatagggagctggccccacgacggccggcggcaggtggctgcagcagcgcagatctagcgccagccaatggcagtggatccggcggcgccatcttcgggagggccgaatccgccgccctagggagcggctgcagctacggcgatggtgagcggctacggcgacagcgtcggtgggtggcagcggttggcggcgagggtggcggatccggtggcgccaccctcgggaaggccggatccgccgcctcggcgctcgtcgaggggcagcgggcacagtgccgtggcgggccggcgccagctagggtttcgggtataattttgatttttattttttttggctagctattgggctgtcgacagtttttaagggtcaaaacttttgaattttcacacctcacgatctgtaatcaacgtaccacaggaaacgggtctgaactaacggaaagcacgaaaccaacccatttagagcgcacaggcccgttaagaaaccttgaacaagcccatttttaaattagtacactctaactagattgtagctggactgtaactagtctgtaactaggttgtaactgggctgtaactagtttgtaatatgtaactggaacatacttaaacttatttatgtaactaaatgaaaaaaaaaacattgacgcctccatcccccagatgaacaacaatactcgcgtgcgaaatcaacgaatcgattcccctagaaatctaggagaagaacaccaaccaaacatacaaacaatttataggacaaacacgatgcggaatttgaacgcacaacatctagaacgcacaaaaaatggggaaaaaatcacctgaaattttgagcagagagcgtgaggaagagaagatcactgcgagcgcgaggaacacgagcagcctaaggagaaatcggcggggaagcgggcagcgagaaaccccaccggtgacgaaaaaattgtcgagaggctgcatcagggcagggtgtacacctccgcctaggccacctcgccaccaaaatgtctggaaaaaggcaacatgcagctatactattcgaaattgggaatcgctcgcactgaccatggcgccggattgaacggccagaaaatcgaatgttttcagcctccgcaaactttcgacagctagctagcaaaaccgttttttttcgctaaaaaatgtctttgtatgtggttggttacgtggactgtatgcgaaaatatctttttaattgcatgcagttgcctttcccgcgtgaagatataacgattttcgtatatcttttcatccatgcgagccggctagccacctggaaagatccgtttcgccccgtttgtaaaagccacttctgtagtagtgtactccccggcggcatgacggcggaggacgtggacgtgtccgagaagttcaagtctgccaatgtgcttgctgtgcctctccaggccgtgcctgtcctatcaaatttgtcggacgtacgactatattattagccaggtcattaattgttctagagtacttaggtttcaatatatatatacggaaccagttgcacgagaataatatgcatatgcatatcttaactaatataaatattcgtattttacttctgtcaccgcagcccccaaatcacaatccctctcagaataggatacaagggaaacaaatcccaaaatcggcacaaccaaaactcaaccactctttgccgcaaaaatcaaccacaatcatcaccaaatcacagaatacgtcacaaaacaccacaaaaataaacatcaaaaagaagtagccatcaaatccgccgtaagccatcgccaccgccgccgacgccgccaccgccaccgccaccaccatgggagggagaagagaggcggtggagggagctgccactgctggatccacctgcagccgccaccgccgtcggatctgccgcgggagggaggctagagcgggtggagggagccgccgccaccaccctcagatccgttcgcggccgccgccaacccgccgcaaccgccgccgtatccaccgagggagaggaggagggggcgagggaagcgagacagggtagagggagcggccgccggcgagggtggcgtgatagcgtggaggtagccgccgccaccaccgctcgtggggaagggggaagggcgccaccgcagctgctcgtgtgggagggggagggcgccaccacggccgccgccgctgctcggtgggggaggtcgccactgctttggggggaggccgccgtcatcgcttttcgattcgagagagagagggggggatcggggcgagtagggggaggaaaatgatatctagggttagggttagggttagggtttggctgcagatatttatgtaggttaggatcaatctggaccgtccattcgattggacggctccggcttctcccgctcgggccttcggactattgggcctccaaataggcctgcaagtttgcgcaatcagaggaggagttggaggaggtatattagactttatttacgggaagtactgaaaatggcacatagagaaattggggtttttatttacatttttatttaaataaatactgaaatgatgttcgtattatcaaaattagccattaagctctgaaaatcccaaaaaaaaatattcaaagagcgttattaataatggttaatttaataaaaattaaatctaaccgtatcatattatttcatggcctgcggtgggaaaatgcacagctactgtcatttatggtgggagagaaggggcattgtttatatccagaactatctcttataactccaatgaaactataaaataactataatcattatcataacattagtttttttcccgttgcaacgcactattgaataataatttattatgagctactatatttctctatatcatttgagacttcggttaaaaacaaatatttttagttttaatacaccgcagtgaagcacggatattttgctagtatatgaataagattgtgtgtacgtatatccaacttgcaattttagacgtatgttagatgaagatggttcagtgcagaaatttatgtgtgtacaactgcattggatgatcgtagcaaaaaacaaattcttcgtcttatattggttcattaagataagtttttttctaggacaaagtccatatgaccccttaaattttacttggaagtcagtataccactctaaactttaattaagccagatatctaaacccaaaattttgtgattccgtaaaatgtttttttttcccatttgtactccctccattcttaaacaatttagttgcaattttgtgaccaatttgcccttggtaattaattgttagataatggaactaagaaaatgaactggacgtgagggaaagggatggaaacaaaatataaatttgtagagtagagatgatattgtaatttcactaatgaaagtgtagtggtgacaagtattttgcagcaaatgatttgatccgaattgaattgacagtcattcaagaacagaggaagtatatacctgtcgacttttgaggtcacgactacggtatttgcatggtatgggtatcatcgataccagggtatatgcgagattgagataaaagagaaagagatagggattttataagtaacaatccctcctgttagctgaagccagtgttgctctatatttatccgaattacagaagtacaatatttggaataacctatctggctgtcgtcaacttggcggcatggatcaccaactcgtagttgacgacagggtagtcttcctcctcgaatatgaactcgtagagatcagagatgatgctagatccctcttatcggtctccgcaggcaccggatagggtctgtctaggcttattttttatgtcgatgtttggcggcgtgtgtctcgtgtctgttgtgtcatgttggtatgtctcctttcctcctaaggggtcttgtatttatatccatagatgttcctttgtccaagtagaactagagagaccaatataaatacaattcgagtagtccttatagtttctatatagaactatactcgttcttccttatccggaactccttctgtatacgagttgttatatcgtataagacttggtatatggtgagccccgccgagtttagacgattactatagtgtatgtggtattcataacactaacaatacctcaatgattttggctacatgttatacacattaggcataccaaaagacagtgctgtttctaataatttgggagccccgtgtgaaatataaaatgagtcattatctttagaaaatagtaaaaactttatatatacgtacatatcaaaaaaccgaaaaaatataaaaaaaggaaaaacaaaaaaaaaggaaaaaagaaaaaaccgaaaaaaaaacaagagaaaaaacgaggaaaaaaccgccacacgtggcctcccgcaccgttccaccgccactccccctctccgcgtgcgccacgtggttgcaccgagtgggtaggggagcggggtaagggagcgcgtgactgatcgccttttagtgatctcgccatccacccccaaacctgagaaagagataaggaaggaagaagagtaggagaagggggctgacaggtggaccccactattttttatttttatcattttcacttacatgtgggacccacttttatttttaattcctccgatgactaagctgccatgtcaacacaattagaccaagtcaacctgccacgtcagcaaaaaccgcttctaaaactattgaaggagtcaatttgaaccggattttgaagttgtggaaagtgttatacccggttttatggttaagggatacgattcaatcgctagagataagggaggactaatagacttattactcaaattttctactagctggcccattacgcggtttcccttttctagcatatcttaaaagagactgcattgatgggttgtcatcaacgtcacttcccttgcaccggatgggtggatggagcgttatgatagtgttgttaatccttcccattatcccttctttctatatttgatacccactgcagcatattcttttatctaagagccgtgggatcgctgagagattaaggctgccacgtcagcttgatttggacaaagctaacagcgataatgcaacttgcctcttcgtgcatgcgtgtggccacaaacaaggcctcaaatcgttttggttgagcttaatattacctttgccggcccttccttacacatgggctgtttcctttcttatcgctcggcctgctcagccccctaccttggtgcgatactgctttttctcctctacccacacgcagcagcgccgcatcgatttgggcgctcactacgtacggtgctcgctggattggccggcgtccctgccgcctgtacgcggtagtggaggtcccttgctgaaaactcctctctgctggtccgtagacgcctcctttcgccattctctcctcttcagttttttcggtgaggtcgccacacagtacccgttcttgctttctcccctttcttcctgtgcaaatctaatccagtggattcttatgtttctcttctttcccagggatttcttcaccgtccggttgtgcattggcttcccctaggaccttcttgcgtcgcctgattgatctacagggtgccgccgtgggagaccctaggcctccacttcccgtgctaaggtagttcaatcatgcttgggtgataccaattttttccttattgtgtgacattgatttcttagcttttttattggtttttcagtttgttcatcatgtttattattactctatttaccgatgccaactgcacttacctctccactaaccaatctaccgccttgcctacatcggccgtatcgctagcttccaccatgaaagggggaagcaaaggagatagcaacagcttaggggcagaaccagaagatcaaccggttcttctcccatctactgatctacatgtccataaagctgtggaatcacaagatcaaccgactattctcctatgcactcatccagatctcctacaaaattaggtattttcgtcaaaaagatctcctctacatatttatttgtggtttgtcttagaagcatccaattaatgctttttcttcccctacatatatacacccattcgtctagcagatccaaacaagtcaaccaatactgcatattccacccacacatgacgatctgtcacagctattggatctgaatctatcctagatccaaccgtacacgacaaccctgctccagagcaatatgtctacctcccaggggtaagtaaaaaaaaaagaacactcacaatttttttcccaagcatgcaattaaaacttaaactacctacaccaccttagctcaccctctatctgcttgaaattatgatgcattcaatgctttagtcatatagttcaaacatattacaatataattggccattatatatatgcaaagtaaaatatcattgcagtaaacatatagaagaataacaacaaaacacattgcacccatatgaataataattttaacaaacaatactaatatatatatatctatatgtacatcattattttttagacaattattaaggtatttgtatccacacacaacccaattgtgctcacaaatgtttttttagtcaccttgatataaataggctgcaactaaagtctatatctcaaagcagctcctgctaacgagattacatccaagcttggcttagtcatacattcgtcagagatcaagttcgaaggaccagttcagtatagggccaatttaaacatggatttaccaagagtaggcattcgggtataaaaaaagagatacattctatggtgatgtagcagacacatcctacgaagctaaagagagtgccacgcatgcagccattcaatgccttcagagaaagaaaaatattgcaataaaggatctactgagaagaaactccacacaaccaagcaaatgttagacctgtttgcacgtagtctagaactccacagaaacgaaggtcacctcctccaacagaaccaacagaaatataacatgttagtgaatgagatcaacatgatctgtgcccaaagtgcattataccttcccatacatgtcaatggttgggacaaccaacatggccaaacaaatgatatctctgttgcatacattggccattatccacctgtcacatcaaatgagatacttgcaaagcatctgatagctcttacgcagtacaagcatgatcgatcatccttccttcccacataggcaagtattattccatctcctacattatacatatgagtattttcaatgtaccaacaggtcattactaaacaatgtctattaccgaccaagctatgcatcccaaataatgaattgcatggattttcattttgcaggataaacaaatgtgtatgtcacatggcaaggaaatccaaatgtggttaaaccatcaaagtgctgtgtccacatggtgctagcttgcatttgcccctttttgtagcatatgttcaaaccgcctgggccatcataattgatgagcaaaacaatatatcccaatatgttatcaccactgttgtaatgttaaggttgttcaaatattgtaccatgtacatatcatacctgatgttctctgtataaatttcgtatcctgtacacatagatatcgactccatgtaaaataatctactctatgttactgttgtttcctcttttatgtaaaaatgtctatgcctattatcttcatcaccatcttattcacagttgaataacatggaacctcatgtttgcatacttcttattaatcttaaggaaaataatttattatgataactatgacaaacttttttatatatgcaatgaaaaatacttaactcatggctcatataagatcccttgaccaaagctgaataaaaccacgcgcggcatagcacgcgtttattgctagttaactcctataaaacttgctccaggttgatccacgtcattagtttttctgaagccgtccgatcaaatccaatgttccagtgtcaaaatgctatttgctcgctcctcacccatgcaagaccttagcccctgccgtttggccttccattttccccttccgtttccgtccccacacaacatccaacaagaatacaagcggccgcgcgacccatccgcgcgacccagccaaatgatagatacgcgagcacccgatggccgcggcactacaatctttcccatcatcacccagtgcaacatggccatgcgagccaatgcgaggaactgatgggacacgagtctacgacatgaggaggggaggagttttatttcctttcaccaatttgagttatctatatttataaacataataatgacccaaagtaatgtactggttaaatatctattttataattaaatttcttattattataatatttttattaactttatgtgttgcatattgttctattaaaatctatgtattgttaattagatcgttaaagtatctgtcatcatatttaatagtagttgactaagctcggcagtgcccaccacataccatgtcttatacggaatcatacctcgtatatatagaaggagttccagataaggaaggactaataaagttctatatggaaacgacaaggactactcggattgtatccatattggtctccttagttctacttggacaaggggacatctatgggtataaatacaagccccctaggaggagaggggacatgccagaagacatatacaatacacaagccaacacacgtcaagacaagccgccggatatcgacgtcagagataagcctagacaaacccaatatggtgtttctgcggaggccaacaagagagatctagcactatatcttatctcgccgagtgcagattcgaggaggaagactaccatatcgtcgactacgagttagttatccatgccgccaattcaatgacagctagataggttatcccaaatattatacttgtgtgattcagatgaataagagcaacaccggcttcagccaacaggatgtagggctattacctgtcagataaagggcccgaacctatataaaaatccttgtctccatctcttttacctcaatctcacatgtaccctggtaccaacgatccctataccatccaaataccgtagttgtggtaccaccagtcgacagtatctataagattttccatataaatgtgttttagttcttttacttattgaatatagctagtttgggtctttaattacaaattttgttgtaaataatctaatgatgaacatggatgaaatattagctatatgagtagatcgtataattgtttggaatttattatcacaaaatatattttcataagaggaggggaggagcaggaatcctaattggcgcgtacacgcccccggcacgcacgcgccggcccacacggcccacctcatctacactcttgagtattaacgtaataactagttagttaaggataatgatgataattaaggaaatactttttctttttttgggagatttttttactcatagattgaaaatttgtaagttacatttgaaaagttttgacttacgatttaatttttaaagtcaaattttgaaaactttcaactcaaattttgaaaatttcaatttgcaagaaaaattttgaaaactttcaactccgacttgaaaactttcaactcagattcaaaaactttcaacttatattcgaaaactttcaactcgagattcgaaaaccttcaacatgaatttgaaaactttcaactcagatttgaaaactttcaactcgagattttaaaaactttcaactcagatttgaaaattttcaattcgatatttgaaaacttttcgactctagatttgaaaactttcaagtcaaattttgaaaactttcgactccagatttgaaaactatcaaccaaagatttgaaaatgcgtggctgaagattaaaggaaaataaaataacgcgaaaaaagaaaaaaagaaacagcgacgctggaggtaccagctggcgctcgcgtgacctccgttgctggtgcgcccgcgccagttaacaacccccggggaggaggtatggcatacatacgtgcaccgtgcaccgtgcacgtatcctgtgggccttttctttttgttagcttttcttattattatgataactccaacgatggaaaatagtgggtctatcgtatttaatgtaaaatagatggttagattttttagaagttattagaaatttctctaatttattagagcgtcacgtggcaactttggagtgtttttaggagtcacgtggcggcttaagagcatttataggaagtttaatggatttttagtatataataactaatatatagatattaagtatatatttatttatatattccacaggaaaggaaagcggagataatacggccaaaaggcctcgactatttgcgactgactgttctaattttctactagataaagttgtctcacgcttgcacacttcactttgatcttttactcatgacgagtcgtagctcgtgtcttgataatgaaattgggatggggcaagctagatcttgagtcatggtcatcagatattcacacaacacgtgtgactctcactactgtttggccaattagtccacattaattcgtgccatgtgtgttgactgtcatcttttctaccgccatgttatctcgcgtggtcatcgacctacggccatggatggaagtgatatggcggcacgtcctatcttaattatttgttctagctagcttcccccttgacttcaaaattatcgaaagcgacatgatttttttttactggaggaaacaatgactttaaactttaacttcgtagtacattaaattattgcatcacccggtagtacattttttcacaaatatgtacaatcaaattcgatctatatatggaagcaatggtatttaccaggaatggatgaaagcaattcgtttatactatggtggtatggtgatgttcgtttctgctaaatactctctcgtttcgtactacaaatcgtttgaattttttcttagtcaaacttctttaagtttgatcaagtctgtagaaaattataataatatttttaatacaaaacaagcatattatcaaaatatattcaatgctaaatttaattaaactaatagatattgctattttttcaataaactcactccaatataaataatttggactaagaaaaagtcaatgacttataatatgaaacagagggagtatggcattctaaactcaataaagcaaagtttacgagaatcagcatatccaagatgacactttaatttttatttgaaccaccaactcaatttgaaacttgaaaccctgtcaacaaactccattcaaaactctctatttgtgttgtcattaccaataaaatagttgagtgtagcttaattggtaatgtttcttggagtgaaaccagctcacccgggtttaagtctcaacttaacacgggtgctcgaatttagagttgaaaaaattgcaaattaagtttgttttagttacacaagcttccccagaaatatctttgtaacgagatcttaaaagatgttgatgcaaggacacccagggttccccagaaatttgatgcaagcaggtgtggtgagtagttaaaatatgttgcacgcaagatcttaaaatatggcacgtatggaaccatgtgcgaaactgtgattctccggtcagataccaatcaacacacaagggtatgaggtaggctaaatgcatttcttttcttcaagggaaagagacttaattattagggttaatagctaaaatgttctccaaatttcatcttgagatttagtttattacttaatgtttcaatctatccatacttatcctttaagtttttattttaattcaaacttatccttaaacctaattaaaagctacatggctaaacatagccaacaactctcttgataaatgacagttataccccttattcacatatataagagtaaaaattatgtgcaatgaatttttttatagataatggatagtaatttatgtaaaaagaaaataaattatgtacctgcaagtatataccatagccattatgctcaagtttcatgtgcacatgttgaaataatgggaagtatacatgcaatgttgtttattcatcttggttttcacttttctagtgtatagttgtatacaaattaatggcaaaagggacattttctaacataattgttgactagatatagccatatggcatattaagtggacccaaggatgattctaagcagaaacacttacttagagaacctatatggacaaaatgaaacttgaagaaccaaatcgagccttcggtgaaacttgagggactaaattagctattcaccctaaatattattattcataaggttgtagtcattgcctacataatcacgaatacatttcagcgcaacaagaggtttctttgagagctactccctcatttcaaattataagtcgatttaaccattttcctaatacgaaagggtatgtagcctagtggttgcagtgacctgagtagtaccccaaggtcctgagttcaaatctctataggagtgaatttcagattgggttgtttgcggggctaagttcctaatttaaatgtacccaaaggtcctaagttcaaatctctatatggtgaatttcatattaggttgtttgcaggctaagtttctaatttaaatggccgcatatatccggttagatgtagaggccgggtaaaaaataccttctctaaaaaaaccattttcctattaaaacttagttatatttatccatttttttaaaaaaataatatctataatatcaaattagtttcattgaatttaacattaatatattttggtaatatatttgtttcgtgttgagaatattattatatatgttttttataaacttagtagttcaataaaaaaaatcatagcaatttataatatgaaacttaaggaatatccagtaggtgagttcatactcgatcagcattgggcatggagaactaccgaatgaagtagatagagtagttcatatagctctcgttcgatcgctgcttcttcctcctgcctgccttgtctgttgcaaaagacttattataaaccgtaacagtttattagtgtgaaaaataatttatgtgtaatattgttagcaatttaaaagctagtgttaaaaaaactatgttaaaaatattttaaaatcaactttaaaattaaatttgaaattttagttttggctcattcttttcagacctaccgatggggctctaattttattcctatcctccatttgcagttttctttttcattttctttgcactgtctcccacttgtaaggggaggagctggaaaggtccagaagatcagttttaccctttttcactgatacaatccaacggcttcctttctcttttctctttcatctgatggtcgaacttttttagcttacgtggatcacctatgtgacatttcaggattcatcattcacttatatagaaaaaaagatcatccggacaatgaggcagtacattcttttcttcatcattaattagtttaatttgtagtccagtacaaacaacagtactacatatcagtacattttacacagcgatgacaaggaaattctagttatgaaccaaacatgtatttatccaattatatagttaggattgatatttttttcgacggagagtatatatcaattctgaagatagggaacaatgatcttttcagttctcaagagagtgagtaatgatcttttctattctactccctgttccataaaaaaaaatcaaactcataatgaatatggtgtatcataattctataaatttagacatacatttgttcatatttgttatattagaatgtatcacattaaatactaaattcgtttttaattggacggacaaagcatgtccatctacccggacgctaacatcagtggcattccaattctgtcaaaagaacagttatcaatagtagctcccaagtcggccaggttgagccaggtacttctcttgacagcattggttcctgtcttcctcccgtgaacctcttgacagcactgctcgcttagtaccgtggtggggcccaccagaagaaattatcactaatcttgatcgtgtctcttgggcgcggttccagaagcttccgtccaagcaatgagtttccttctctcccgaaataaacaaatttatagagtttaaattttatttaaaaataaattaattcatatcttcctacgtttcatcgaaatcaattattatcaaacaatcacaaataatcaaatacggtcctcgtaagaaaaatcaattaattgtgaataaagaaatttgcggagtgggcgctgccacactgtttataatagagggcagtcaaatttctgttgtgggtcacacactttggacacgagcctgagaaaaagcggttgatcagcaaattttgtccacatactgaccagaaaatttgcattccacacttttgtctgaaaaaatttccaactaatccgctctcttacaaagtgttcttcgatgttttccttcagacgggaagagagacttctaccatgtatagttatgctctcttcgtctttttcatatgttctgccctctatttttctcagtcgctctttctctattttactcgttattaatccctcaacaacgaaaaagaaaagggaaatcaaattattgcatcacccagtagtatatgttcgtttcttctaaataccccccctcccggccccacttcatattaatcgttcaacttttctttttcaaacttttttaagtttgataaaatttatagaaaaatataataattttttaatacaaaacaagcatattatcaaaataaaatatattcaatgttaaatttaattaaactaataaatattgcaaacttttcaataaacttgatcaaacaaaaataaatttgacaaaaaaaagtcaaacgacttataatatgaaaagagagtatgactatgacatgctaaactcaataaaacaaagtttatgtgaattagcatatccaagatgacactttaatttttatatgtaccaccaacttaatttgaaatttgcaaccatgtcaacaaacttcatttgaaactctctatttgtgttgtcattaccaacaaaataaattagggatcctagagaaaatgagcgtagcttaattggttaggttccttgcagtgaaaccagctcactcgatttcaagtctcaacttgacacgggtgctcgcatttacggttgaacaaagttgcaaattaagtttgttttagagctggtttggtttgaggcctaaattggccttacaaatatttgtcaatttcaatagtgtttattgtctatttggtttgaagccaaattttggcatgcctaagaaaataggccatttcaacagttaatttaggctattttggcttcaatccaaacataattttacctttgccaaaattagcaatgccaaaatttgacattgacaaaaattgataaggccaatttaggccacaaaccaaaccagcccttagttacacaagcttccccaaaaatctctttgtaacaagatctaaaatttgatgcaagcaggcgcggcgatttcataaaaaatattgcacgcaaaaccttgaaaatatggcatgtaggaaccatgtgcgaaactgtgattcttcagtcagataccaatcaacacacccagggtacgagctaggctaaatgcatttcttttcttcgagggaaagggactaattattactattattcataaggtcatagtcattgcctgcatagtggcgaatacatttcatagcaacaagaggttctttgagagctactccatcgtttcaaattataagtcgatttaaccattttcctaattaaacttagttatatttaaccatcttttttaaaaaaattaacatctaaaatatcaaattagtttattccattaaatttaacattaatgtatttgataatatatttgtttcgtgttaagaatattattatatatgtttttttaaaaaacttagtagttcgattagaaaaagaaaatcgtagcgatttataaaatgaaacgtagataatatccggtaggtgagctcattcatactcgatcagcgtactatgtgtatataaggtgtcatagcagcactgggccggcatggagaactaccgaatgaagtagatagagtagttcataccgctctcgttcgttcgcggctccttcctgctgcctgcctgcctgcctgcctgctgcgtttcgatcgatatcctctgcatgcaattctgaccgggtcgtcatcgtcgcgaatgatgctgctaggttccccttcgtccggcggctacggcggaaaattcgccggagcttcaccggccggtgggacgacgaccatggcgccgtcagcaaagcagccgagcagcagagctcctcctcctgggatcactggaggtagtagctagctagatctcgatagagctagtattattactgtaataatttcgtatctttctcacgttcataaaaacatatatatgtcgaagggcgcaatgacctgcgaattctttcgccagcagcagcagcagcagctgttggaggtcttgagatgaagaagccggaagcagaggggattgcagagagcctgcaagcgacggtaagactaattgcagaaattttgatggaagatctgttaaatttttgtccactagagacgtagttaatttgagatgggatgagtaaaaagttaacttattttgtgacttccataccacttacatcctatatacattataattaattacatgctaatctctactattataaaaattaaagatgtttttgccagtattttggtacatcatctgtgtatgagtcagtttttaagttcaattacttttgaaaatacatatctatatttgagttggtttttaagatcgttcacttttggtaatcatataagaaatctgtttaaaaaaactcgcatgctaacctgagacgatcggactcctaactgcagctcaggattttctaaaaatatatatatccaaccgaacccccacagtgaatttcatcttaactaaaccatataacaacaataagattaaaatagacttcacccgttgcaatacaatggcattttttctagtcctataataattataatataattatactataattatatttgacagattttgtaaggttttctgttgaatgatggatatgtagtcccttattttttaagttagggtgacaatactatagtttaatttggtggggtctcaaatttttaaatttggaaaccattgtaaggaaaagtattgattcaaaacataagcgcaagtattgatcccttgctatttgtttgcttagcatgcatgacagggacagtcttgtaggcgccatggtccatggaagttttgcaccttgcatgacttgttctggacacgtacgcatgcatatcaaagactggtataacagtgttctaaaaaaagactggtgtaacaggactaattagcatgagtcttctttgacaccgacttgtgtttgtcttatatacaatattagatacgcatatatttcctccgtttaacatttgtcattctagcattttccacattcatattgatgttaatgaatctagacatatatatctatctagattcattaatattaatatgaatatatgaaatgcttgaatgacttacattgtgaaacggaggaagtatatcgcaatcaacgaggtacacgcagtaaatattatgaccctttatatatatatatatatatatatatatatatatatatatatatatatatatatatatgacacaggtgattttttttaatgtttgataatatttagtgcaaatatgtaaaagtatatgttaaggttagagttaatttcatggatgataaaagaaatcataacaaaataaactatataattttttgaataattaatatgaatagtcaaatgttgaactaaaagataacagcgtcaaatattaaaaaaaaatgaagatgcatagtagattggatgtccaacttcttttcttcgttcgattccttaatttgttggagaactttcaaccatttaggattaatgaaagactgtttaggattttaactacgcaggattaatatatatggaggataataagagggtctccaattaattagtatgaaaaactacccaaacccatgaatccgtacatgctacgttttcgtcctatcttacgataaagatagaacccactaaatcctaaagttcaatatgcaaatatatcatattatcatcttctaacaattattatatcttaaatatcatacaagcatgctatattatctataattttattctataatttattaaattttagagctttaaaatgcaagcatgttaaaccaccatcctacataatttatataatattttaatatatcatctctccatcatttattataatatcctatatacatatatattttatcctcacataattagtattatttctctcttctataattaagccatatcacacaattatttctagctcttagatgattaatttatggtccaaattatcctgctctttttcttctcactataccaccttaattatttttaacccttaaatgactaacctattgtccaaattattccccttcttttcttctctcttaaaaccccatcactttatttttacatttaaatcatcattctatgtgctatttaaatcatcataaaccacatcaacttatgtaaacttatattatctagctatcttacatattatttttatctattgttattatactaaactcccgtagcaatgcgcggggtttcacatagtggattgaacaactaataccgtctcattatttactaatacagatttttagagtattacccgctctttaaaatattacaatttagattctaaactaagcacatcactatatgttatttttcgaatttttgaaatgactaaattataaaaagaactagtcgagaatttaggtcaggtacatctcaatatttgtatttcttgatagttaaatttattagtagttccgaattttcaaatcaataaaataaaataatatattgagacaataagcctaacacaatgcaacttgatattttcaatacacaattgttattgtatatagaaaaaatatatggatcttgcactatatcctttgttgagttcattatatattgttgtgatgaacgctgcagcacaggaaagaactcgaggcaagtataaggaagcagctccaaggagtggaattatcaccatccccatatgacactgcatgggtagctatggtgccactccggggttcgtctcacaatccaagcttccctcaatgcgtcgactggatactagagaatcaatgggacgatggatcatggagtattgacgggtccatatccacagccaacaaagatgtcctatcatctacgctagcatgtgttctggcactcaacaaatggaatgttggtagggagcacatcaggagaggtaacatatatcaatatttatatatagatacacttaacaagttaatgttcatttctattttctttaaacatttttatactcattgaaatttgggttatactcaatttaaaacttagagcccaaacaccatagtacctcagttaatttctctcagtttggtgtgatatggtaatttaaaacttagagcccaaacaaaccatatcacaccatgcatggttggttatgttaaccaaacaaacaccatgcatggttatgttatagctaaaacaagcttgggtaataaaatctttactgtaagagaaatcattgtcaaatacttctattaagtctattagtttttttttttactacgggatacctacatattattgaaattttcatgatgagatatattttaggactatatgtcgcagtaaagatttaactatacgagggtacctttcaacctttccacattaattgctttaatcatatcttactcttaaacgtcttaattaatcctatggtacgacggctgcaggactaagtttcattggaagaaatttctcgattgcgatggatgatcaagcagttgctcctataggtttcggcatcactttcccagctatgctaacccttgccaatgggtccggcttggaagtccccgtcagacaaaacgatattgatagtcttaatcaccttcgggagatgaaaatacaaaggtttaattgccaatatcaaagtttatcctagaatggatatttatattgtttccgaataagtttataacaatttccaagcacatcaactttttaaaactagataaaactgatcatccgccaactttttttaaaaaaatgaaccttttcagctaaaattgtaaaactaataatctctgaaactattttttttacacataatttagccacgatgggctacgggtgcgtggcaacattgtttgccaccaatccaaggcagaatgatcaaacaactgctacgccatggaaaaatatgaataaacctagcccatgcattaaattgcgttagctcaaagtaaaagaaaagacctgaacatttattagctagccaactgggtaattattaatttcaattttacaatatatttttttgacaaaataataatacaaacgagattgcaaacgattgatttgacgtatatctgagttacaagtaaattatcctgaatgttttgattcattaatttagagaggccgggaaccattctcgtggaagaaaggcctatatggcctatctggcagaaggatttgggaaccttctggagtgggatgaaatcatgatgttccagaggaagaacgggtcattgttcaactgtccttcttcaactgctggcgcattagccaattaccacgacgataaagctctccaatacttgcaatctctagtcaataaatttgacggtgtaggtgagtttgtatatatacttctccttccgattcttttatttaaaaaaattactctgttaattcacttttaacgtatgtttgaccatttaatttatccaaaaaatacataattattatttattttgttgtgaattagtttattattaaacatattttgagcatgtgattttttttatatttgcataaaattaatgttttgaaaaaacgaacgatcaaacgcatgtttatccaatgaataacagggggcagtatcaagaacttgctacattctgttattaattaagtacttactaatacagtagtacattgttgcagtgccaacactgtatccactaaacatatattgtcagctttcaatggtggatgcgcttgaaaacatgggaatatctcagtattttgccagtgaaataaagagcatccttgacatgacatacaggtaataacctcgaataaatatttctgtttgtttgtatatatgagctcaaatattgatgatcaagtttacagttcctggttagggaaagatgaggaaatcatgttagacgtaacaacgtgcgcaatggcatttcgccttttaagaatgaacggttacgatgtttcctcaggtgcgttcgaattctggaatttgatcttatttcatattggggttcatctagaatttcttttgatttaacgtatttgattaaaatacgttgcagatgagctatctcatgttgctggagcttcaggcttccgtgattcgcttcaagggtatctaaacgatagaaaatctgtactggaagtatacaagacctcgaaacacagtatatcagaaaatgatttgatcttagatagcataggctcttggtcaggcagcctattgaaggaaatgctgtgctctaatgggaaaggaactccaggccgtgaagaggttcttgccttcaatttgaaattcccatttggccatttcgcttcagacagctcagtttgtgtttaaatgagaatttcgcttttgtaatttcagatcgagtttgctctgaagtatcccttctacagcacattggaacgtctagtccacaggaagaacattgtgcttttcgacgctaagggctcccagatgctgaaaacagagtgcatgtaaggctttcatcgaaaatatgcaaaatctgagtaaataaaataacacatgaggtactaattcccttatgcttcttactgtactcgatcaggcctgttcatgacagtcaagattttctagctttggctgtcgatgatttctgcatctctcaatctaattaccagaatgaactgaattatctcgaaaggttggtgttccaggccgttgtcatgttattattccttttttttaaaaaaaaacaactcaagatcaatactgttccaatatggttctaacctagacaaattgccaaaaaaaaaaactttttttacagttgggtgaaagacaacagactcgaccagctacatttcgcacggcagaagataacatattgctatctctctggtgctgccaccacattccgtcctgaaatgggctacgctcgcacctcgtgggcaagaaccgcttggttgacggctgttatcgacgatctcttcgatgttggtggattagaacaagaacaagaaaacctcctagcattaatggagaagtaattaattaatatgtcttcttttttctcaaaaatgttgccatgttttatatctctagcgagctagctagctaatttatcttctctgccatgcaaaaaatggttctcatatataggtgggaagagcctggtgaagatgagtactactctgaagatgtaaagatcgtgttccaggctctttataatacggtgaacgagattggcgcaaaggcttccgcgttacaaggccatgatgttaccaagtacctagtagacgtagtgagtcactctcgtttttgcgcgattgcttgaattttttttgttgcatactccctctgtcgtaaaatataaggcactcccatctgtccaaaatccgttatattttggagccgagggagtattcgcttacttccggttaatattaacaagttagaattctctctatatatgtatctgcagtggctacatgtggtgaggtgtatgaaggttgaggcagaatggcagaggagccagcatctgccaacgttcgaagaatacatggaaagtggcatggtgtcacttggacagggctgtacggtgatgtcggcattgtttctgatcggagaaaagctcccggagggtattgtcgaacttgaagaatacgatgagttgttcaggctgatgggcacttgcggccgtctcctgaatgacattcgaggcattgaggtacgtactttgtgacagaaagtccatgctgtccttgtcctcttttttttttcaaaattttggtagatatgcaaattaaaaattttaaggtgtaagtaatccgtaagattgtgtatttattagttccaacggagaaaatctggtacgacatttctaaggccctaattattaacaaaaatttcacaaactgcggttattttatcaagattatctttttgtgcaattttgaccggaagttcataaaaattaaaaaaaaacaattttatcataaaactacaactttataccctgtatatatgtgtgtgtgtctaacatgtagagttgtagaactaactttcaaaatcaggtattgttttagttctatgaaatgcctagctaaagactgtaattttgataaaatagttataaatgtttttcttttaaaaaaataatttaattattactctaatttgttttggaaatactagtaattagccatggttgctagctgctggtcagttaattagagcttgcaagttctgacgaagcattgcttctcaaattgcggcgcagagggaggagtcggacggcaaaatgacgaacggcgtctcgctgctcgttcacgctagcggcggctccatgtccgtagacgaggccaaaaccgaagtgatgaagcgcatcgacgcctcacggaggaagctgctgagcttggtcgtcagcgaacaggaaggccctatcccgaggccgtgcaagcagctgttctggaagatgtgcaagattcttcacctgttctactaccagaccgacggattcagttctcccaaagagatggtcagcgcagtggatgcagtcatcaacgagccacttcaactcagattattgtagattcatctctgtcactttttctttttttttttttggatactaaagtactaccagtgttgcatgtaaaagctgaggtaatcagaatgtggatgacttagttgggattacacagtttgatcgatggccgcactaatctggttcataattttcaccggtttgtggacagagtggaaccatatataagagagtagaggatggtcgtcgtccatactcaaatttgttaggatttgcgtcatgtatgttatatgaaagagcaaataaatacataggttaggtatgtgtaataaacagagatacgatgtaagtatccagagctggtggctaccagaacaacataatcgtacatctttggggtatgttgtcacgacctagcacaggatgtaaattgtacactccatcccaagaaaaaacctacttctgagaacaaatctggataaataattgtctggattcatttttaaaagttattcttttgtagatagagaatatagtcgtggtgtgttggaggatatggccctgacctcgccgccggtgtagttggtagataatgaacctgcagaagaaagcaaaaaaccgtaaaatagagtagagggcacgcagggaggaaggacgaagaaaggaatcgaggaacgatagatatatgaaaaatatagattctgtttaattcttcgttaactcttcctaaacaattacaactctttaaatagattctaactctgcttcttatcctaacaaactgaactacttatctctaagaaaatgacttgatgcttaatgataaaaaaccgaagacaaattagaaaaacatttcagatcggtcattcgagcgtagacagaacatcgatcggatacaacatgacgaccttactttcaaatcaatagttctcttcttcctacagacatgctagtctccttctcccacatctggagtgtgagcctgtggcagaatgtgtgcatgcaactcacatgcgatcaatgcatgcgcaaattaagcgacgatctcttaaattatttatccaatttacaaatacaccattgtatttatcataattaaatctttataataagatctctattgattttatttcgatgaaaaaatatatatatatatatattggccattgaaactcattgtttcatgtgtgagaagacaatgttttcacaagagttcgactaagttcttttttgtcgcaatgaacttttttaatatttcatttggtattgtttggatatttcaataagtgtatttcgatgttttattacattttgcaaacgttacatgtggtgttctttgaatgtttcaggacgcattttataatgttttggcagttacaaatggatgtttcatatataatgtaaaggtgtttcatatataatggatatggattttcatcccttgagaagatatccctcgttgcttgcatgtcacctaaatagatataatttttttaacaacatagattaatatgaattatgtcattccacaaacatgcaaagccaaattcaacttgtacaagttgcaacagaaaaacaaattaaaataaaaatagttattgtatattcgcagttatgtttgttatttttgttataatttgtagaaattgaatttttaacttgcatgcttgtggggcgatatatttcatattaatctatcttgtcagtttatttcaatttgcttggtgactatgtagatggcaagcaagaaacaatgggatattccctcaagggataaatacactttcccggtaactattgtatcaatagactattagattaattataaataatttggatctagtagttggctatactattaaacttagcttctagagaagacagtggagagagggtgaaaagagaaagggtgcgagatggaggaaggtgagttttgccacttacatgtgggtcccactacccctaatgcatatttatttatttttttctgattaggatgccatgtatgtcaaaaccactcttaatactgctaaggatttgatttgtatcggctttagaagttggaggacgctctatatccgatttagcggttgaagggtgtgaattaaactccacccatgtttgaggaccaaagcgaacgttttccccctcaaccctaatctaacatgtttattttacctcgcacctctttccctctcagcccaccaatccaagtccattacatgtccctctccctctcttttcttttagcccaacagtccctgagcccagcagctagccttttccttttattttttcatcaaacagaagtctaaaaaactatcttcttctccctcttctcacggaacaatggaccaaacctgtcagggaatattctgcgaatattactttctaatttcaactaattcctttcttttttcaagaaaatcatttctttcgaaaattcagatctccaccgtaattccaatcgacccagttcaagtgtctaatctttttctaacattgagatatacctaatgacattaatatttattaatagtaatattttatatctttaggatttggttggttttctcccttttgcaggtagttgacgacgcccgaaattattttgaacaaagacggaggcaagtcatccttcgatcatattgctcccattttataaaatactatgtttgcaaaattgcaaggccactgtgcacgataaacctgactagccctggtttgcgtgacaaaccaacatacctgcctagtagttgcattatacccgtaggttgtcaataacctgatcattgttgttccggcattgtggtacctcggcactagtgcattaaggcttaggattccatggttccactcacgggcacaattgtttgtcgaaatgggaaacttgggtctatgaaacctgtgaaaaactccacatgtggtgtcagtgagtttgtgaaataaaagttgtttgtgaaaccctgcaatgcaaagtggtcgcctctatggtgatgctttgtaatcgcacatacagacatggaattctatctgagcatctcacaatgcgaccacatgggtggaatcagacacccatgactaagtaattagctggctagagatgccttgtgtgccaatagttggagaatgctgggatgaggtgttgtgagctgaattgttgtgttgggcgcacgtcaaatattaacgtgttgggcatgattgaaaaatggcatccaaattcttgggtagaagatggttgaggttttcctcatacttagttcagagagaacccttctatgtggcatgaggtatctttggttggctttggaaaagccttgtcatgaacctccccaacttggctagtgagggactaagatcgcgtcatgtgggtgaagcgtgcaccctctgcagaggatatcaaactgtttgaacatctgtgctcatggatacaggcaaatcctctagcatagttttatttgctaagtgttgagaaaaggttgtggttggagaaaaggttatggttgggaatcgttaccagaatcggtcataatgattgatggatgaccgtggaataggatgttgggtagcatcatagctaggcttcccgaggggaaacaatatatgctggatatttttggatggctctgggagcccaaaaaatgagtttgtgagatcagctgatgcgctgaggtcaagaaactaacaaatgaaatgagttagaaattgcctgttggcagaaggttgtgcgccagtgtcatgataggacagtaggcatgatatatagttttaatcaactaaaatttgtttcgcttgcttgagttgttgcaaatcaactcacgcaaaggatcaaggtgaaagcctctttccgaccatgataaacaacccacgcttagagtttaaaaaagtgctttcaaaagtttgcgaaataaacccagacctcctttgaagccagcatgctcaaaatttcagtccgttgctgagtacgtatgtactcacccattgttgtttttccccctcccctaggaagacataagtgaaggttagaatttcattcctaatcctaagccgatgcttgtggattgggtctagctgtgcttctcctcttgccgtttatattggaggagttgctttcaaggtgtgacctgctaaaggtataatctattcatactaagtttagttgcaatgaggcgtctcggttgatcgcgggtaccagcgattatgtgcatggattggtactggcatcttgatttgatgggagtcggttcatgttgatttcctacagcacaccctctcttcaattaggtgggcggggtgtgacatgaagaaaaaccaaggaagtaattatctattaggggaaaaggtccctaaaataatatttccatgtatacttaaccttctaaaatatttttttggctcattttactccttaaactattgaaataattcattttacttcctaacggtatttttctcctccctatataggttgtattttgcactagaatttggtaatatgatgatagatgtattacaacttatctctcatttttaaaaaaaaagatcttttatctctctaaacctaggttgaaagcatctaggattagttcaaacatcgagattttaaagtttaaccaaacagtcgtaaaaatttttaacataatctatgactaaaatatttcagttttaaaattagttaattggatcgatgccattacaaatttgccgatttggaaaaatagcactatttttcattatatcgggtacgtcccattgaaattttgtaaaatttgaactgtgtgacttcgtcacgatttgtcaatacctccaatggctccaactcctgccaacgcctttgtttcttctcagactcaggcgaatgtctggtggtgctcaggctaatggacgatagtgcaaagggactttatctggcaatggagccgagctcaatacccggcatggcgtcgttggctgcatggttagggagaagatgaggcggcgctggttctccgtccccaaccttgcctctactacatcgtcgttggctgtggcatgcggggctccaccggtagggaaggcaacagctctggaggcagtgggggaaaagacgaggtgaatctggaggccatgaccggcgctcacctccaccctccactggtctcacggttcaaattttggaaaatttcagtagcatgcacctgatattgtgaacagtagtagcatttatttttttaaaaaaatacgaattgaaatggcatggatccaattaactcttttaaaatatagcttatgaaaaaagaaataaatgaaagaaattttcctagggagtgaaccattttcaatagttcattggtaaaatgagaaaaaaatagttatgaggttaagtaatccaatatactttgagggagtaaaatgaacttttttttaaaatatagcttatgaaaaatagaattgaaatggcatggatccaattaactcttttaaaatatagttatgaggttaagtaatccaatatactttaagggagtaaaatgaactttttgttatactaagataactacatccgttaagtagttatgagccaatcgctcgctagtggcggttatatacataattaaactgcgggactggctgaccccacagctttttgataagacccatgtagaccttaattttcatgtataaatttagaaaaaaaaatagagaaatgatctcacttaaatatatcacacataatgtttttaataatttttttataactatagatcccgtcgccagatgacagggacgagatggaaggacgcccaccgaccatgtaccgcgtaggggcgctggtactgtgcaattagctagtctaactcgtgatttgatattccaagctcatgcagctactttcccgttacttgtcgttgttctgcaccgttggtgctagcatatatacgctcttgaaggtagacatctgtgtgtactacgtgggatgttagtacttccgttggtgctagctagcatatatgctcttgaaggtagacttatgtgtactacgcgggatgttagtacttacatatattaagattaacgaagttatcatagttgtctcgttatcgacgagtacatcgtctaccactgaaacaataattagccgtaaatatgaacacctgtttcaaatttatgacttgaacccggttaggttgattccacactgctaaaaaagacaaatatgtatcatcactataggtgccggaacatctaaaactggcacctataatgcctttcccgccgatgcacccatccccacgagccaaatattcaaaactggcaccattatgtccaaataggtgccagtttttaaataaaaccgacacctaaaacctatgtcagagaaaggtgctggttatagacccaaaaccggcacctttaatcttctccctcccacactagccgttggtgggccccatacataggtgccggttttaagataaaggtgccggttctcgacccaaaaccggctcctttgttacaatagtgcttttcatacccgatggtgggtcctacacataggtgccggtttttttatgacaagacaaaggtgccggttctcgacctaaaaccggcacctttgttccaatagttcctttcatgctcgatggtgggccctacacataggtgccggtttttgtatgacaacacaaaggtgttggttctcgacccaaaaccggcacctttgttccaatagttcttttcatgaccgatggtggtccctacacataggtgccggtcttttgtatgacaagacaaagttgccggttttttggtttagaaccaacacctttgttccaacagcgcttgtagtagccgttagtgggccccgctcataggtgccggttttgggtctagaaccagcacctttgtttcgacagcagtacatatactccatcccttgccactcgagctgattgagcaagaagagagcggcgcctctcgttcttgcccgatcagctagaggaggggatcagattttgctccatttttttgtggggtttggttaaagattgaaggctaaaggtaaatagtcattatttctcgatccatttaacttttggttgttgatttgatttaacctaaaaaccggcacctatttgacagccacgttgcaatttggcttagaaccagtacctattatgaccatataggtgctggctttaactaaaaccggtacctatttaacaaccacgtggctctttggcttagaatggacactattagaatttagaaccatataggtgccggttttgaggtcaaaaccggcacctattacaagtatcatcaatgccgcctccattgtgccggttgggaaaaccggcacctactagggtttcccaacaggcaccttttaccctttcagttgagcagtgtcatatctatttagacctatactgacaaaagtgctacgctggagatcagaggagaggaggagcatgagttggtgactaatttgtctccaactacatacgcgtgcccatgcaattgtggggtccacatgattagtaatgtggaaaggaaaagataacaagtgtgggcatgacattagaaaaagaaaagaaaaaaaaattgagaatgacgtggtggcaaacttgtagactgttgttgtatagactagttggttggtagtatcacttcatgtgacttggccggcccacacatccgtcatgctcatcttcctacttccaattagcagctggcatctgggctcatcaatatatccgcttccacgcattctgagatggaccacaagtgcccctgcgattaatctagcagcgaagggagactactgccaggagagatttggctcatgtgtaacaggctatctcagattctaattaaggatcaataggtccagaaaaaaaatagaattagttgactggatctaggaaaacagagagatggtttggtccacaaaagacatgtgggacaataaagtttaagttatgagatataaaggagtacagtaatttgcatcaatcggatcacacatcaaatacaatgtcattcatattggtctaatagttgcacataacaaactgaaatagctatcccttccaccgatcgagatctggccgctttgcaggagggattggttttgtgggatatctataggccactgagcatgagggaggtagagatgatggtacctggtttgcggaccttatatttacagtgtacttgacgactatatcagttgtgtctgtggtgttatatgtgacatgcatagtgatacaagtgaaggttttaactccttcgtttgtagcacctaagctaaccagaccaattaagttgagccataggttgatctttagtagtgatacttgcaagtatcaatgtcatacctatcaagtactactgatgatagcaatattttgaggtaattacatataagatattgtgcctatttttatcaaacttgttggtgctcatgggtatcatacttggtaattaggtgtcagatagggtacccacggggtatgaaacttggttaataggttttggacaaggtgcccatgagtgtgagacatggtaccaagataactgatgtgatacccacaggtatcagacctagtacctaggtaatagatgtggtatctatgggtattaggcctgaaaccttgctattcaatatggtactcacaggtgtcacaaacgtggtacctatgagtatcagacctgttttctaggtattggatgtggtatccacatgtaccaaacccatctgttatctaggaccacttatgtacacttcacatggtgtcacgctcgataaaatacaatcattttatcaaacgctcattgtattaatccccgtcccaggaaggcagggtacactaacaaaattgtagtattacaagccacacttgcaggggaacatatccaatgcacacaagctttccgtgcccgggaaacttctgttcataggatatgttccacacttgcagaagcgtaaatatagtactttattagagggtgagcatatgtcccagtaaaaaaaagggtgagcatatgcccttatattcaaagataaacaaaaagatagcggaagtctatggaagcagcatccacaggccctcgatgacggtcgagctagcagtccaagccttctcctccaaagcatacaacttttctgaagtagaggtgagcaagaattagtaccacgcggtaccagcaagccataccggatatgcacaataataatgcataggcatagcaaaggaatggcataatatggttcattttgcagaaagccatagtttacaagtttaaagctatttttaaaacatgatcccgatccaagtcataattatatagctaataagtttgcgagccacgcaaccaacccaggttaaacaatctacttaaaaccatcatgaatctattctctcaagttttagaaagtcgagacctacttaaagtaactttgctaggcatgcccaccagtaagggcgtggctattcgaatagattttaactctgatcagaggtaatacaactttacccacatgacacgtcctccttgtcatgtctaccatgcgccgcgttacctgaaagtactcggtctcggatggaatacatgccaagacctttaatatgattcgcctcaaaagaaactcttgaaggaaaccctcagtggaacatactaaagtacttgccccctcattattggtctcttggtcctcaggatgggattggccatcgcgactgggcaccaattggccagagaatgaccctcggcccatagttcccgagtttcactgcctcgagacaaattaaactttcgattagggcttacccattagatttatggttccacgataagacttcacaatagatgcccgagagagagccccaaaactagttttttctttcgcaaagaaaacaccatgcctcccatccatcaactacttagttgatggtctagcacttaatcaagattttatgttgatattagatatgcacgtattcattttagtactaggatatgtcgcatccgatactagattggttttttatgggacggagggagtaaacccttcctaacataatgtttgtactctctccgtcccaaattagttgtcttcataccattcaaatttattctcacaatacttgtcactaccaagtactacttatcccatcaattcactaatggagaaatgatctttgctgggtcggcccaaaaccacaatagttctggttccaaaaagaaccgagtctgaaaatgatctttagtcccggttgaaaaccccacagccattctatgatctttagtcccggttcatcccctatcagtggcctgtcaggggggccgacgatctttagttccggttggtgacaccaaccgggactaaagatcaccactttaataccggttggtattaccaaccgggactaaaattcaatgcgtagtatataatccctcgcgcttatcctcttcacagatccctctcctcctccccctcctccccttcatcctatcctcccctcccctctcctccccctcctcccttcccatccggcggccggcggcctgcggggccgcggcggcggcggccgtggcaggcggtagcaggcacgggatgagtggcgagtggcggcagcggtagccgggcgccctctcctctgccggctggagttctttctccttttttttgataatttgtgattcactgagatgtataattttgtaattcattgcatggatctgagatgtatttgaattgtgtgtatttttttaagatttgtgatgtatttgatttgtgtgtataagtaacttaagatttgtgatgtgaatgatttgggatgttactttgaattggggatttggggatttggggtttgatttggggatatgcatggcacttgattcgggagaaaattcagggattaactctggccaaagaaacaatgaaaaaaaaagaaaaaggaccaactgggaccgctaccctctctttaatcccaataagtaacactaaccgggactaaagataggcatctttagtcctggatttcaagtcccggttggaaaccggagtctaaaggggttactaaccagaagtaaaaatgatttctccaccaatgatcacatcttatttaaatttcttccaattctaccccttcacacagacccatcttttctcatccataaattactttgtaaggatattatagttttttatttcaaattatagaatatgtcaaacaattttaaaagacaagtaatttacaacgaaagaagtatatagtgcaggtctgaccaaatgactcgaaaataatcctcactcggccactggctgcagttatagctcaggctgccagtgcaaggatctctggcctaatctttcgtactcactctctatctctctgtctcttttcttcatgtaccgtacaggagtctagaaaatatttttgttgcattttctttctcttgaaatggttggttgggtgcgagtgccatgttaataactcatgacagcgccatgtggtgggatatttctttcatttttttcaaggaggcagcgtacagtgttttttcttcttcttctagattttcctattcactcccgctccacgctacaacacgtgtcggaacacgtgtcagtatacggtagagtcatctaatagcgaatcagctggccggcggcatccaccaccagctttagatatactccctctctaccaaattatacttcaataattaatttatttcatatcatatttctaacaaataaaaaatcagtatcacattgtcacgcccggaatttctatccaaaattccaaacgcttacatgtgtgtgaaccctcgtccaggaatcagccgaggcacacaataacaaattgataatagagtacaattattactctaattaataagcgaataaaatgtcattacagagatagatagttcctctcaatcaataaaaatctaagcagcggaaaataagataaacggcgcatacggctccactccacaggcagcttgaccaaggctacacctaatcctccacaccatcagcatcattgtagaactcttcctctgatgaatgattgcaaggtgagtatatgacatactcagcaagccacgcagcaaatatgcaagtgcacaggataacaaaggatggcatagtagggtttcatttgcataaacagcatttaataaacatttcagaatttaataaaacagttaagtaataattaaaaaatattaatccaacgctatacaacataccctgttctataggcccaaccattctgaacaaccatcccggctgcacagttctatctccaaaccaggaatataccattccaaaccaggagctaatcaaattattaccagttatagcatcttctattatggtgagaagggtgagactaatcacgaaagacattgttagacccgcccataaccgcgggcacggctattcgaatagttttactctgatcagaggtataccactgtacccacaagacacaaccccacatcatgtcaccatgtgcctcaataccaccacggtacctcggaaaggagttgtgacaataccccttgcacaacacaatccattacagcgcacctttcctggatcataatcacccccttataaacaaggcatggactccccagcgacccccgtgggcttatctccgccacttctcagtttggtgccccgcaatgaaccatgctatacaaaagataaagccgttgcccacgctggcttgtggttagcacggttaatgtttcacaaccgaaactcgtgaaccggtccttaattgtcatgagcacgaccatcaaaaccatgtgctcacaacccaccattatcaggttttagttggcacattaattaattaaccaatcacgattgaccatcgtgaactatcattaagccatcattaaataatagtgagtcataagttatcccaataatgtgctaatgtttctaagcagggctaagcagttatatctaatatctagttgaaccaatataaataaagctcaactagtcaaattataataacccaaggtatcaaggaataaagtaatcaagaacaaaagggctatagcaaacaataggttaattccacccaatgacattcgaaaataaatgcaatagttgaatagaaacaatagttttaaacgggatcaacatgctcaaagggttgtttgggatctgtgtgacttgccttgctggccttggaactcttcaaattcttctcctgcgaaaacggactctccgaaaacgtcggaatctaaacagaaagaagcaaaatcaccaaaacagcacataaacaagcatgaacagtacatgtggatgtttttaacatgtagatctcaattttagaaaaatttagagacttgaaccaactaaatccgagctaagatgaattagttatgaatttttgaagattaattcggattaaaacacttatatagattttaattgaattatgacgcaataatgaattatttttgaaaaggaaaaaggggtttattgcgtcagcggctagggtttcggtggaccgggcacacgggcgacggctcacgaaaacggacggccgagatcgacttgatccaaaacggacggccgagatcgatcggtccacgaccggctcacgggagacggggacgatgacatcggcgatgacgtcaccaccggcggcggcggctcggcggctcggacagcgcacgctcgccggcgaacggcggtgcttcggcacgaacggaagacaccaacgggtagagcgcgacgcggtgaactcaccggtgaccaaaggagcggcggaagaccaacggacggcgacggcgacgaggtcaaagcggcggcggagatcgggtcgacggcggcgacggtgctccgacgatcttcggcggcggcgaaggggcagacgaggacggcggcgacttggcgaccacgatgacgacctccccgagcgacggcgacgactagaacggcggcggtgcacggctagagcgacggcggcgacggcagcgctaggtctcacagcgctatggcgctacggacgacgagaggcgaaggcgagggtggcggcgggtagaggagagctcgggggtccttttaaaggggttggagggcgacggcgaaggcccacggcgaccggcgacgagaaggaaaggtcgggctcggagagagaaaagccgatccgattcgacctcgaatccaacactttccaagccgatttagccgatgtttccaaaggagaaaaggcggaggagatcccggagattgtttcccctctattgattcggccggagaaggaaaggagcggccggatttagaaaggaacggcggcggcgcgaaactagggtttcgggcggcagcggccggaggttgacgacgaccctgacaggtggggcccacctgtcagcgggcggacgcgcgcgcgcgcggcggcggactgggccgaggagagagagaagggttttgggccgactttcggcccaaagccaaaagagactttttaaaacttttttcaatttaaattatttatgaaatgcaattccatttattaaaaatacttccttagctcaaataaatcccagaaaaatctaggaattatagaattaagcaaagtatttaatgaaattttatctggccccattttatattggaatttattaattaaaaataaacttctcttctaagcttttaaaaatcatttctaaaaattccaattaaacaacaatttatatattttgaatttttagggtgtgacacacataaagtacatcaaaatataaatcaagtaatatactccctccgtttcgaaatgtttgacaccgttaactttttagcatatgtttgaccgttcgtcttattcaaaaacttttgtgaaatatgtaaaattatatgcctacatgaaaatatatttaacaatgaattaaatgataggaaaagaattaatgattacttattttttttaataagacgaacggtcaaacatgtgctaaaaagtcagcgacgtcaaacatttcaaaacggagggagtagcatacataatatttagtataaatgtggttagcatgatcattagtcaaaagtcatgaagtttaattttttttagaaaaagggtgtcttattatttaaaatggtggaagtattactataaatagctaaacatcgataagcaaactcaacgccgacgatcaattaagatggaggacaagctgatactggatctgtgcctatcagcgctgttcgtcgtcgtcctctccaagctggtatcatctgccatgaagccaaggctcaaccttcccccggggccatggacgctgccgctgatcggcagcctccaccacctcgtgatgacgaagagcccccagacccaccgctcgttgcgcgcgctgtcggagaagcacggccccatcatgcagctgtggatgggcgaggtccccgcggtggtcgtgtcgtcgccggcggtggcggaggaggtcctgaagcaccaggacctcaggttcgccgaccgccacctcaccgccaccaccgaggaggtcttcttcggcggccgcgacgtcatattcgggccgtacagcgagcggtggcgccacctccgcaagatctgcatgcaggagctgctcaccgccgcccgggtgaggtcgttccagggcgtccgcgagcgcgaggtggcgcggctcgtgcgtgagctggccgccgacgcgggcgcgggcggcgacgctggcgtgaacctcaacgagaggatcagcaagctcgccaacgacatcgtgatggtgagctccgtcggcggccggtgcagccaccgcgacgagttcctggacgcgctcgaggtcgccaagaagcagatcacgtggctcagcgtcgccgacctgttcccgtcgtccaagctcgcgcggatggtggcggtggcgccacgcaagggcctcgccagccgcaagaggatggagctcgtcataagacggatcatccaagaacggaaggaccagctgatggacgacagcgccgccggcgccggcgaggctgcggcggggaaagactgcttcctcgacgtcctgcttcggctgcagaaggaaggtggcacgccggtcccagttaccgacgaaatcatagtcgtgcttctgtttgtaagtatcacactcacactatatacctatttcctctttatatactccctccgtccaaaaaaagacaaaccctcagttttcgtgtttaagatttgactgttcgttttatacgcaatttttttataattaatattttcattgttgttagatgattaaaatatgattaatactttatacgtgacttatctttttaattttttcataattttttcaaataagacggacggtcaaacgttgaacacggaaacccagggtttgtctctttttttttgacggagggagtacaaactagcacagtgttactcccccatctatcccaaaatatagtaatatatattactaccttcatttaatatcataaatcatttgacttttttgttagttaatttttttaccaagtttatcgaaaaaaacagcaatattttcgacacaaaatgagtgtattaccaaaattgacaaaatatatgaaatgttaatttgaacgaaactaatttcatgttgcagatgttgctaatttttttataaacttagttaaacctaaagaagtttaattaaaaaaaaagtcaaaatgacttaaaatatgaaatagagagtagtattctctccgtttcatattataagtttgacttttttattagtcaaaattttttaggtttgatcaagtttgtagaaaaaattagcaacatctacgatataagattagtcttattaaatttaacattgaatatattttgataatatgtttaacttgtactgaaaatattagtatattttctataaacttttttaaactaaaataagtttgactaagaaaaaatcaaatgatttataatataaaacaaatttgatttataatataaaacagagggagtagtatctagacaacttctaatttagcattaggttgctacatatatatgaacggagcgagtatttattagctgcatgagttttttctcttatttgttggtcttctaagttctaaacttgaataatgtatatgtgtgtgcgtatatatatattctaggacatggatgactattcataaagtaatttatttatattttacttttttgtaagtaatttttcaacacctaaaaatatcagttcaatatatcatatagattatcaacaaaataaatttatttttgtttaaccctacaaattcagaaaaaaaaataaacattactacagagatccgctaactttcatgcaaattagcactgaagtttaagtcaatgcgttctgtaaatttagttacatattgtgcaagtttatatgatagaagtcatacaactgacgagaaaagcaaataccatttttaggacatgatttcaggggccagtgagacatcgccgacagtgctgatttggaccttggcggaactcatgcggaatccaagaataatggcaaaggcacaagctgaggtaagacaagctgttgctgggaagaccaccatcacggaggatgatattgttgggttgagctaccttaagatggtgattaaggagactttgcgactccatcccccagcgccgttgttgaaccctcgtaaatgccgtgagacaagccaagtcatgggctacgatataccaaagggaacatctgtgttcgtaaatatgtgggcgatatgtagagactccaggtactgggaggatcctgaggagtataaaccagagagattcgaaaataatagtgtagattataaagggaataacttcgaatttcttccatttggctctggtcgtagaatttgtccaggtataaaccttggggtggccaacttggagctaccattagctagtcttctttatcattttgactggaagctacccaatggaatggcgcctaaggaccttgatatgcatgagacgtctggaatggttgcagctaaactcattaccctaaatatatgccctattactcatattgctccaagcagtgcgtaacatccgtcctaatggaatgcatcctcaaagacagcgcatatatatagtagtttattgaaaaaataacgtgctgggagaaaagggtttatatgtatcctatgtacaattgttttttcgggcagactggcctatttgtgtataaactttcatgttgcatgttatacatgatgtatcattccagtgtgtaatgctaccactactttaataatgtttttttctaggcaggccactggccacgtacggtgtcatctctacaggctggtacaacgaaataagtttgtggttccttaaaacaaaacgaaatcagattatgataatggcaagggttcttgtggcataacatcttgtgcgaaaatcgattttcacaaatggtccttaagagaaagaccaatcgaaattgaaccgtgcgcctttgaaaaaaataaataatcctatttcaagaagaatcacaacttttttatatgaaattattggatggcgtcaaacatatggaaattattactctcaaggagtctacaactttgtagttgttgttgttttttatttgagattgtttatgaacccatatttatgttggaattgatatttgcttcaaaaagatcaaaagaatatctagaaacagacaaatgagtttatttttcagaacaaacaattttccttttcttcttggaagcatcttcttaagagagacttcctgttactgttgtttgggttaaatgagagagatcaggatatagtcaagaactagattttgattttgatgttgtaatttattttttctttcatatattaataaaatattaacagtggggatttcccctgctgtggttttcttatcaaaaagatcaaaagaataagttgtttgataggtattacctatgagtgtgactgtgtgagagtgtgaggtgggatggtaaggtgggatcgggtaaagttcgaggtaggggttcgattcttaaaagctgcacacatataattagtgcaaaaaaatacatgtaacttgtgccctgtgactgctcgtgagtgtgctagtgttaggaacaccaaaatgatatattttgaaccacttatcggtgacggctaccggcctgacacaaatgagttttcacatcactgaccaataatccgtgaccaagccgcttatcgacacatatgaaggttcccgtccaatacagatgactagatccacactagtatttgtgtgtaacactactgcagaaacatcatagttgctggttagaaacttgctatatgtgtcggttttctagccagcatcgggtgccggttattagttaagaaccggcacctatagtcaatgaatcaaaaaaaatgccaattcaatgcatcgagcagcttgccggtggatttagaccgccacacagctcggttctggaaaaaccaacaagcaaggtggaaattagagtagacttgcatgttctaagaaaaaagtagtcatctaacatcattatgggaaggaaaaaagagaataaacaacagtcgttttcgtggaaaagtaagtgcactctaaagctcaaagttttcctttggttaatgctcaaggacagattcaacacaagagaaatgctgcaaaagaaaaagtttaatatccaaggtggaagcagatgtgtaatgtgtaatcgttcacacgataagaatatgatgcatctctttttctcctgtcaaattgcacaacaatgttggcaacatgttggtatccagtggaatctcttaatggaatttatgaatatgatcatcacagctcataacagctttcaacacagtttcttcattgaggttctggctatggtttgctagcacatttggaatagaaggaatgatttcattttcaacaccattccagtgaggttggacaaatagaaagttgatttagagtcagaatttgccatgcatatgcacacagcaaaggaatcggacaagcattgtcacaccccaatttgataccgctgtacaacggcacctgacaggagcgtgtcgtagggaaaacggcgtgaaccgcttcctacgaaaccgcgatctcggtaccagtcccaggacatagtgctggtacccacggtgacaaatatgaatcattgcaaatccttaaaatagatagaggacttatttaccttaacttaggttgcagctcagaacaacccgagaatgcaaccgacgacacggacgaggaaacaccaacaacagcagcagcagcggaaccaacgaactaacgcccaacaccacaggcgacggctgggaaccaggacgaaaccctaatcttcacttcactttatcttctcttcgggcggaggaactatatatatatatttatatagagcaagggtgagtactttcgtactcagcaagtcacgggaatttaggtgtttaatgcaagcttggaagagaggcaaggttgttttgcaaatcttttatttgaagacattttgaaatcactaagtgatttatttctttctaagtttggggcaaaaagagacttgcgtctcgattcgactttaagagatgtttttcaacagctcaattagtaatgtaccgacctcccgggtcagatcattacttctcggcttccagagccatttcacttgattaatcggctcccagagcctttttcattttctcggactcccagagtccagctgcccagcagcacaacaaaccgcttccactcgggaagcctagtctatgatgcccgcagacatcccgaatcacacagattcgtttctgaccactcaggtcatccatctgccacataggctgattctggttacgattcccacaccacaacaacttttcacaaagcgcaggcaaacaaatctacgcaaggggaaccacctcacatccgcccatgaccgtgggcacggctgttcgaacagttagttaacctctgcagaggggtacactttacccacaagacacgaacttactccagacactggccggtgtcagaggttcgcgacaaagcctttcccaagccgacccagggatacctcatgccacatagaaggatcaaatcctcacataaacataggccattttaggcgttcaccaaatcaaactccaaccacctcgatcggtaattcagcaagcttctcgttcttgcattaccaggaacccggtttggctccaaccgaccccgccccggcgttcccaactattggcatgcgaggtttccctgaaccgactagctacttagccagggtgtcccattccaccttgtggttgcactttgattatgttcgatgagtttcccacaggaatcggtccttatatgcgaatacgggacagtgccacataggcacaacccccgcatcgcgagttttcacaattcattttattttcaaacacaccgacaccacatgtcaggttttgaaggcttcacaaacccatttcccaagttttcgacaagcaacggtgtatgtgggatatttggtatacgcgctcagagagcacgaataccgaggtaccacaagggtggagcgacaaggaatcagggtagtacaacctacggaaattagtgcgactactgggtaggtccgtcggtttggcacgcaaaccgaggccaagcaagttaagtgtgtgattctaataatgcaagttgcaaacaaaataataatgacttttcaattataggggcaattgatcaaagggtgacttgccttgctcaaagtcttcacgaagcttcacgaatcttcaagaaaacccgcgatcgacgaaaatccggtaaccgcaactatacgcaaacaactgaaaacctaagcaaaagaccaaaagaaagatcctatttagactaattagtagtgccattaaatagatctcaattttacggaattactggaagttgaacggagtcaatcggagttgcgaatcgggtgatatgaattttggaagtttaattggagtttctggaataggagaaatggtttatggaattttacagaaataatattctcaagaatattattgacagtcactgccatgtgggaccaaaggaaatggtttatggaattttggaagaaggaattgatttatgggacaaaggtaagaggatttattaaatccctaaaaagaaaaggatggagggatgtatattagactttttcgggcggcaagggcgcggcccaagggtcgaaggaggctcggccaagccatttgggccggcgcggtcgcgggaaaggcggcccattagggcgcacggaaggggagggagcggtccggtggaccgggtgcacctcgcggggtcccatgtggggcccacatgtcggcagcaaggttcacggtggggagagcgcacgcgggtgcggtgctagggtttggtgggtgcggtgtgcgggcggtgcgccgggtggatcggatggcagcgggcccacatgcagccggttggcgcaccatggaccgtgcgcgcgaaggtggggaagggaggaggcggctgacccggtcgcagccgacgtggctccgacgtggctgccacgcgggccaacgggaggaggaagaaggggaggccgggaatgaacggcggacggcggccgagttcaccggagcaaggcacgacctcagtggaaaaagggagctcaccggggaggagggaagggacgagaggaagcgagccgacggcttggattcgccggaaagaggccggaggcggcggattgcggcgacgcacgctggcggcgagaaaaaggggaaacggcggaggggcgacaaggattaaattcaaggtggtgggagtatctccggggttcaaggagttcatctccggcgtcggatggggcagagcgacgccgtggagatctggcgacgagcggcggcctccgggagcgagcggcgatggtggcaagcctatggcgggtggtggcgaggctaggggctttgtctacgcgcgttcgggaggactaccgagctaccgcgcgagctaaaggagggagagggcaagcgagaagggagaacggagggaggcactaccgagccgagacggcgcggtgacgagcagccaacggcgcggaagcgagttccccgtcgtcgggccggggaaggggaagaagaagggtggccggagccctcttcggctccgcgcgcacgccggcttcccggcacacgcgagggcggaggaaggcaaggacggcgacagcaaggcggcgatggcactgcagcggtggagactgaagtgggagggatttgagaggagggactcggctttatagtggagacgaggtcggttcgcgcgggaggtcggttcaaaccgaccttagggcggtcaaggcggcagctggcggtcgtgctcggagctagcggccaagcggcggcagaggcggtcacgggcgtgacgccgatcggggaaaaagcaaaaaggggagggagaaaggagcttggcttccttgccactttgggaggaaggaggaaggagggagagagaacgacggagaggagcacgagctctgtctcttggttttggaaggatgcggcatggaggcatcggggccgagcgatgacagcggcgatgacggctaaaggcgagcggggccgggcggctgcgcggcgcaggcgcggggacaggcggcgtcagggctgacgcggcggcaaccgggcggtcggccacgcacgagcgcgcgcgcgcggatgcgagggcgcggccggatttcgaacggcggcggcgggaaatcggcgccggtgggggagcttctacgggagagagggagaaacggagagagagagagagaggatgagaagagagtgggcgctccctctctcgagcgcggcacacgcgcaacgcacgtgcgagggggaggaggaggagcggctgagaggagatgggccgaggagaaaagggcccacaaaaatccgagggaggcaaaatagacttttttggaggagtttgattcgaagagaatttgaacttggaatttgacttagattttggaattgggatctcgatgagaggaaggagtagacggaggattcaagacggggttttggatattttggatctggggaagtatttggcgatgattcaaagagagggatagaatttcagagtttgatttggagacttgagtcggaagaggaatttcgagggggcaatttttgatggtgacgagagggatcaaggacggatttgaattgagatcttggcacaacttagactcgcacacaaagaacgaaaattttcgcaattaggattttgccgaattaatttttaacgactcacgaaaagcggagcgttacagatccaccccccttacaagaatctcgaccccgagatttgaaggtggaccacacacacgaaaccaaaaagggatcttcaaacttcttcttagcttcatactctgctggtctttctttatctcgagaatgcatacttgccacaaaacggtctggtactctgactcacttagcagtctcccttttgctgtggctctgatcttacacgtggaagctgttcttcacctgctctttccacttgctcgagattcaaaacttttccctttgtttctactggcacatggttcagacgactttgtccaacaggcggtgaggtcaacgaggctgagccactgtttggtgacttcgaaccttttgatccaggtatgttgggaagaattgtcgttggttggactggctttgtcttgactttgtgaaggcactttatcttggctttctgagggcaatcccacgaatagtgtcccatctcatggcagatgaaacattcgactcctgccttatgaccacgtcttttgaaggtgtagggcatggtgcggaattgcttccttcatggctattactgttgatcattgtggcttgctgaccaggttctgacatagtcgaacgagacgtagaaccggaaccatttgaatgctgagatgctttctgatagtattgtgctggcgagttggtttttcgacacaaaccttcttttgctcgaatctctagggacattactctgcgtctcttgtactcttgcatctcttgttctgcatcttctagtaacaaggacttatcgaccatttgctgaaacgtcggaaagtcgtgagccaaaagtttcactcgcagtttcgcatccattccttttaaaaatcttctgatcttctttttatcagtgtctacatcttctggggcatatcgggccaatctattaaagcgactcaaatactcgttgatgcaagaggatccttgcttgatatttgcaaattcttccttcttcaaatcaattatgctttctgggatatgtgctgagcgaaaggcttctgcaaactctgtccagacgatggtactagcatctgtatgggtagcacagtagttatcccaccaatctgcggcaggtcctctcaactgatgtgcggcgtaaagggttttctcttgtggagtacactgtaccagatttaatttcctttccacatctttaatccaatcatcagcttcaatgggctcatttgtttgggagaactccggtggacgagatcccaggaaatcattcagttttgattggtcatcatcttgaaccatatggggttgacgctcttgtgtgtgttgttgttgcatagcaattatattctgaaccattccttgtattatatgtgtttgcatggccaggatttggtgaaggtccacgggtgggggttgattacctcttgcgacatcattaactgatccggaagtaaccgtatgatcactctcggcttcttgctcatctgtccggttaactggttgatcggggatttctgactgaactagctcttcttcaacaccaaagcgattgggagcacgggtctgacgggtagaacgacgagccatctgcttcaaagcggctgagatctaactgaaccagaaatgggacaaggaaaggagaaaaaacaaaaacactacatcaaaacggttttcgaaatcacagaagacataggtggtgtgttccagccggtaacccaactggtctaacacctgaacacggactaccaaacaaaactcacacacgcactagttcaccacaactcctaccgagcgggtgacggtactagggtctgcctaccaacgagggcttaactaagactcctagaggcttgagctcacctttcttcaactgggcgtgaagacaggtttactctaggataaaggtcaaaacactcgactagcttctacttttggacacaaaagatttttcgcaaaactagagctaaaggggaccacgacaccttaactttcacaaatatttttgtactcaaataatgccatcctattcaggggtttcgatcctagggccaactaatgctctgataccatctcctgtcacaccccaatctgataccgccgtacaacggcacctgacaggagcgtgtcgtagggaaaacggcgtgaaccgcttcctacgaaaccgcgatctcggtaccagtcccaggacatagtgctggtacccacggtgacaaatatgaatcattgcaaatccttaaaatagatagaggacttatttaccttaacttaggttgcagctcagaacaacccgagaatgcaaccgacgacacggacgaggaaacaccaacaacagcagcagcagcggaaccaacgaactaacgcccaacaccacaggcgacggctgggaaccaggacgaaaccctaatcttcacttcactttatcttctcttcgggcggaggaactatatatatatatttatatagagcaagggtgagtactttcgtactcagcaagtcacgggaatttaggtgtttaatgcaagcttggaagagaggcaaggttgttttgcaaatcttttatttgaagacattttgaaatcactaagtgatttatttctttctaagtttggggcgaaaagagacttgcgtctcgattcgactttaagagatgtttttcaacagctcaattagtaatgtaccgacctcccgggtcagatcattacttctcggcttccagagccatttcacttgattaatcggctcccagagcctttttcattttctcggactcccagagtccagctgcccagcagcacaacaaaccgcttccactcgggaagcctagtctatgatgcccgcagacatcccgaatcacacagattcgtttctgaccactcaggtcatccatctgccacataggctgattctggttacgattcccacaccacaacaacttttcacaaagcgcaggcaaacaaatctacgcaaggggaaccacatcacatccgcccatgaccgtgggcacggctgttcgaacagttagttaacctctgcagaggggtacactttacccacaagacacgaacttactccagacactggccggtgtcagaggttcgcgacaaagcctttcccaagccgacccagggatacctcatgccatatagaaggatcaaatcctcacataaacataggccattttaggcgttcaccaaatcaaactctgtaacgccccgattttcgttcgggttttaaaaatcattaaataatgcattttctagaaattaaataaaagttaaatcaatttaatcaagtgaaataatgggagaattaaaattttcccttaaaaatcattggccgggaatattttgcaatattctttgtgccctaaaatactctccggatttttccgtgaattttcggagttcaagaaataattttaaagtcacaaagttcattaaaccaatttaaataaaaagaaaacaaaataaacttccccttcctccctttcgggctcggcccaaaatcctctttccttcccctcccgcggcccggcttgcctccccttttggcgcaagtctgcttttcctccctcccggcctctcctctcactcaggccgacaggtgggacccgtgggccccacctgtcatccccaacctccagccccggccggcaactgccatggccgcccgagccgcccacgtcgccgcccctccccgcgcgtcttccgattcccgcgcgcgtgtgggcgcggtccaccccacgtcatccccttcctccaccatttcccccacttctcccctccaaaaccggcgccaaactgcccccactcacccacgtcgccggcacccctttcccccttcaaatccgtcgccaaccggcctccccgtcgactctcgaggctataaaaacgatccccgggctcccctcatccttttcccccattttccccaagccgccgcgccctccctcgctctccccgcgccgagcacttgcaccgccgcactccggcgaaatccggccgccgtttcccgtcgctagggtggccgccgcactgctccgccgccaccgccagctttgccgccgcccgggcaaactcggccaccgctccatttcccctctccacctccgtagcgccatagccacgcgaaccacctctctccgccgccgccgccgactccagccgcgtcgcgccgccgcttcggtcgacgtcgactcgcgccgttacctccctcaggtccgcaaggacgaggaggacctcggccgccgcccctcttcgccggaaatccgccagagctcctccttcctcggtcgccggtgagctctacctcttgtcatcaccatcggccttcgtttccagtcaccccgcatcggtcctcctctccctaactccctcttctccttcggaaggtcaagggcgaccccgtccgccctccgtcctcgcaagccgccattgggcaatcgtcgtcgccgtcctcttcctccgcgtcggccgccgcttccggtgaggatctctcctcccttccttttttttcccgtccccctttcttgccgaccgccgcctcttggggtgcgtcgccgtccccgtgcgcgccgctgtcctccggccgcccgccgccgttccacgtcgccggctgctgcagccggttgccgcctcccccttgccgccgccgcgccatgtctcggccgagccggcttcatgccgtgcccgtgccccagccgcgccgcctcgtggccgtccgatcggcttcgggccgatccgggccgtcggttcccgtggaccggcggtggaccgcctcggtggtcccggtccacggtggaccggcgcccttgtgccgctgactggtggggcccgcttgccggcgccgcccctcccctttgatgacgtcagcacagccttttcctttgagaaaataaataataattgcgcaataattcgtgaataattatagaaatccatttaaatggctcaaaacttctaaaattcatatctaattcattcgaactccgaattgagccattcaacttgcaaaattcatctaaaattgagctctacatgtctgtttagtttttatgtactgttttcttggtttttattagagtttttcctcgttttgcgtgccagcgtgtagtttccgtcgtttcggaagtccgcggtcgcgaggaaaagagttcggaagatccaagtgaagaagcaaggcaagtcacacattccccttgagcatgttgatcccaatttataaatgttttaccgtttacaaataaatatgcatgttttgctaattacatgggatccgggtattacctatctgctcgcttgtgccatgtttacttgatatctgtcctttgtcaaccttgggtaatgaatcgactagctcatgttacttatgtgacctagctagaactatatgcttagccatgcttaattaccactagctcagtcgatgggataattgcagaattagacattctagtatcttgttgagctgcgtgctcgagacatctggccatgtttcatggtcgtaattatccaactaaaatgcgactgaatggtgggctgtgggtgcatggttttgtgagtcgcacccatggcaattaaggaccggttcacgggaaaccctggaagacttacagcgcttgccacaagcgggaatgggtaactgcttgatctgaagtatagctcgaccctttcctaggcaccggtggcgagggtgggcgtgatggagttgggtcggccggggtgtccggttgtccagctgccggattcaccgcggcgcaagaggggaccgcccactgccttttgaggggtgggggtgaaaccttagcgtggtgtggatggttaggggagggttatgcgaagggtctcgtcacaatcactcgacatggtgacgtgtgcatcatgggcatatgatgacgcggtgacatgtcggtgggttgtgtcttgtgggtacagttgtgcacctctggccagagtaaaactattcgaatagccgtgcccgcggttatgggcgatcgaccagattcaccgtgattagtctctcttaataaatcgacccaatgcactgtagtacaggtgggttggttgggcctgttcaacgtggtgtagcgttgatcagtggagattttaatgttactttaattattcaacagttttactgtttgctaaataaaatgttttacaaccgcctttatgcaaatagccacaaacccctccttgtatccccttgcacgtccgcatcgttggtgtggcttgctgagtacggtggttgtactcagccttgctattattcccccttttcagaagtgtagtgcttctgagttgaagacgaagttagaagaccaaggctcagaccccagttgagttttgcctgtggagtggagctgaagccccgctaggatcgcctttttccgctgctgctgcttttgtttcggtgtgaggactaagtgcctcttctgtaagtattttacgctttatttacatttggaactgtttattacttgtcgttttctgtaccctggctggtcctggacagggatttaatacacaaaatagtctggaaatttgggctaaatttctgggcgtgacaaactccaaccacctcgatcggtaattcagcaagcttctcgttcttgcattaccaggaacccggtttggctccaaccgaccccgccccggcgttcccaactattggcatgcgaggtttccctgaaccgactagctacttagccagggtgtcccattccaccttgtggttgcactttgattatgttcgatgagtttcccacaggaatcggtccttatatgcgaatacgggacagtgccacataggcacaacccccgcatcgcgagttttcacaattcattttattttcaaacacaccgacaccacatgtcaggttttgaaggcttcacaaacccatttcccaagttttcgacaagcaacggtgtatgtgggatatttggtatacgcgctcagagagcacgaataccgaggtaccacaagggtggagcaacaaggaatcagggtagtacgacctacggaaattagtgcgactactgggtaggtccgtcggtttggcacgcaaaccgaggccaagcaagttaagtgtgtgattctaataatgcaagttgcaaacaaaataataatgacttttcaattataggggcaattgatcaaagggtgacttgccttgctcaaagtcttcacgaagcttcacgaatcttcaagaaaacccgcgatcgacgaaaatccggtaaccgcaactatacgcaaacaactgaaaacctaagcaaaagaccaaaagaaagatcctatttagactaattagtagtgccattaaatagatctcaattttacggaattactggaagttgaacggagtcaatcggagttgcgaatcgggtgatatgaattttggaagtttaattggagtttctggaataggagaaatggtttatggaattttacagaaataatattctcaagaatattattgacagtcactgtcatgtgggaccaaaggaaatggtttatggaattttggaagaaggaattgatttatgggacaaaggtaagaggatttattaaatccctaaaaagaaaaggatggagggatgtatattagactttttcgggcggcaagggcgcggcccaagggtcgaaggaggctcggccaagccatttgggccggcgcggtcgcgggaaaggcggcccattagggcgcacggaaggggagggagcggtccggtggaccgggtgcacctcgcggggtcccgggtggggcccacatgtcggcggcaaggttcacggtggggagagcgcacgcgggtgcggtgctagggtttggtgggtgcggtgtgcgggcggtgcgccgggtggatcggatggcagcgggcccacatgcagccggttggcgcaccatggaccgtgcgcgcgaaggtggggaagggaggaggcggctgacccggtcgcagccgacgtggctccgacgtggctgccacgcgggccaacgggaggaggaagaaggggaggccgggaatgaacggcggacggcggccgagttcaccggagcaaggcacgacctcagtggaaaaagggagctcaccggggaggagggaagggacgagaggaagcgagccgacggcttggattcgccggaaagaggccggaggcggcggattgcggcgacgcacgctggcggcgagaaaaaggggaaacggcggaggggcgacaaggattaaattcaaggtggtgggagtatctccggggttcaaagagttcatctccggcgtcggatggggcagagcgacgccgtggagatctggcgacgagcggcggcctccgggagcgagcggcgatggtggcaagcctatggcgggtggtggcgaggctaggggctttgtctacgcgcgttcgggaggactaccgagctaccgcacgagctaaaggagggagagggcaagcgagaagggagaacggagggaggcactaccgagccgagacggcgcggtgacgagcagccaacggcgcggaagcgagttccccgtcgtcgggccggggaaggggaagaagaagggtggccggagccctcttcggctccgcgcgcacgccggcttcccggcacacgcgagggcggaggaaggcgaggacggcgacagcaaggcggcgatggcactgcagcggtggagactgaagtgggagggatttgagaggagggactcggctttatagtggagacgaggtcggttcgcgcgggaggtcggttcaaaccgaccttagggcggtcaaggcggcagctggcggtcgtgctcggagctagcggccaagcggcggtagaggcggtcacgggcgtgacgccgatcggggaaaaagcaaaaaggggagggagaaaggagcttggctcccttgccactttgggaggaaggaggaaggagggagagagaacgacggagaggagcacgagctctgtctcttggttttggaaggatgcggcatggaggcatcggggccgagcgatgacagcggcgatgacggctaaaggcgagcggggccgggcggctgcgcggcgcaggcgcggggacaggcggcgtcagggctgacgcggtggcaaccgggcggtcggccacgcacgagcgcgcgcgcgcggatgcgagggcgcggccggatttcgaacggcggcggcgggaaatcggcgccggtgggggagcttctacgggagagagggagaaacggagagagagagaacgaggatgagaagagagtgggcgctccctctctcaagcgcggcgcacgcgcaacgcacgtgcgagggggaggaggaggagcggctgagaggagatgggccgaggagaaaacggcccacgaaaatccgagggaggcaaaatagacttttttggaggagtttgattcgaagagaatttgaacttggaatttgacttagattttggaattgggatctcgatgagaggaaggagtagacggaggattcaagacggggttttggatattttggatctggggaagtatttggcgatgattcaaagagagggatagaatttcagagtttgatttggagacttgagtcggaagaggaatttcgagggggcaatttttgatggtgacgagagggatcaaggacggatttgaattgagatcttggcacaatttagactcgcacacaaagaacgaaaattttcgcaattaggattttgccgaattaatttttaacgactcacgaaaagcggagcgttacaagcatctttggcaatcatgggtagataatccgctgtaaactgctcttctttttggattttcttcccccctgttgtaaatactcctctctctctttttattatattataatatatatcacagtaggagcctctactactgttttcatgtcaaaaagaaaagaaaaacaaaaatttgttggctgttccagtgttcttccaacaaaacctggatccggctactcaacttagctgctggtagaacaagaagtggaatctcccctacatcacctcaccgctgacgtcctcccccggtctgcgcactgcgctctctggcccatccatcctcgccgctcctcatccccaatctccccatgcactgcagtgatccgctccatccttccatctgcttctcaacccattaattgaggcatacaaatgatgaacaagtcaatgaaaacaaacacaaattggacacaaacctgctcgttgttcgattggaccgaggtttgaacgtgcgttcgcttcctgcgattacttaggaggccggatctggtgcggttggggagagagagctcagaggtagcgaggaggagagggcgccaccggggagaggaggcagaggaggggaagggtggctggtgcgcagagagggaggaggagaggcggcggagaatgatggaggacgaggtggagagaaagcggtggccaggcgcgggtggggctggagcggcggcaatgtgtgtaatgcggcgatggggagcgatgtgcgagcaacggagctaggagttgaggataaggtgggagcgattgtgaggataagggaggaaaagcgcttggcttggagcagtacgtgcgttgcggcggtaaaagtgcatctaggcccctaatgattttggtgattaattacaatgcgattagagaggactaacatttttatttaagcaaatgtgaaggttgttatgtcctcaatgagttagcgtaatgcatatcccgccaaatacgttgatgtgatgtgatgcggcaaaggagcaaatggtattttgtacctttttcttttccttgagtcaataggaatgccgcactattaatagggatgatgcattgacatatgaggagtgatcaaagtgctcaaaatcattttttaaaagtgtttcttctcagtttgatgtgttctggaatttttcggagtttttcgaaagtcatttttggactttccgaaaatacacaaaactaattttcgcttctggaaattttcggatatgtccgaaaggcattttcggactttctgaaaatgactgagaaggcaaacatggttctggatatttttggacttgtccgaaactaattttcagattttccgaaaaacatcaatagagtcgttttcgcttctgtaaattttcggagttttccaaaaggaattttcggactttccgaaaatgtccagaagggtgtttttggttctggaaattttcggacttgtccgaaaagttttcggaatgtccaaaaaatctctcgttgactttgttgttggtgctgagctggaattttcggacatgtccgaaaatctttcggaatatccgaaaatcacaatcattgtgcacaacgggcagaatttgggctgtggctataaatagccccctcccctcacttgtgagggctgctggtcacattggatattcttgtgcccttggcttgctcttgttgagattcacttttgagccttgctttcttgtttcccctctcacccgtgttcgatttggatttggtgggtgtgtgagagttgtggattcgagtttgtgtgagtgcttgttgttgacttcgtgaagatttgtgagcacttgcatcatctccgggagttctttgcttcatttgttactcttgtaggttgaggactcttaggcggctaggtgtcgctcccgagccaccgatctacttgtggttggccgggagaagtttgtgaaggtcggatctcacctccgaaagggaagagatacccttagtggaagaaggagtgcttagtgcaatctcttgaggaaaggattagctaagacccggctcttagtgagctcctcaacggagagtagaatcccctcaaggattcgaacttcgggaacaatttcgtgagcttcatctttggtgactttacttcctccctctccactagctttgcttatttgagctgctataggtctagttgctgtttgtactagcatattcttgttgtaggcaactagatcgaggatttactttactatttgtgctgactccgaaaattttcggatatatccgaaaattactgcttccgcttttaattgattttttttaattagcctattcaccccctctaggcctaattgacacttttaggtggtttttaaggatattggtttttaaaaaatcgatacctataatatattataggtgccagttcttttaaaaaacggcacctatagtatgtaccggttttatttcaaaaatcggcacctatagtgcttaaaaacgccttttcgattttttcatcagggaggtggggaaaaagaccataggtgcaagaaccggcacctatgagtcgatacctatgaggtgttttgtagtggtgtacgtaatatcccaacgttaacccataattgtgttctagttcaaccagtttgcgtattttggtttgggctcgtgtagacccaatgttcttgtgtgctaggataagtcgcacattggaagtatcgataggttttccagcaaatcataacacctcagagttaaaaatttaaaacaaagtgatcacaaaagtataaatagaacacactaatagaattttcatagtgtgcctttagccacccgcatgtggagatcttcaattcacacatgcagtaaaaatgaattttgacacattattcctaaatatcattcttttttacgtaaaaaaaaaaatccccaataccctacctaggcagcacatgcatgcgcagtcacaagccacaagtacgcataattttcgcatgaaatcactagtctggttttcaagaaaactttcaagctccgtgccaccccacctcacactcatagctaatagcgatgcaataatttattattttgatcctttttagacaaatataccaatgaacatacttgggcccctgaacatatctcaaatgagaaaactttcagttgtagatcttgccgagggcttaattataattttttccaatctatcatccaatgaagaagttatgatttctttcatgaaatcggagtgttcacattttccaagagacggttctatttgtgcatactgttctcttaaggtactttcatgtgagaattaatgcaattttcataagtggtttggccacatgagtcacatgactccctcaccactatcacaaaacacaagtggttattttataaccccatgaagagattaaaccggggatgtctgcagaaaattgtttttatggaagtggtaacaatagcattacacttttcaaatgacatcacatataccatgtaacgagaatagctacacaaataggccagtctgcctggcaaagcaacttgagaatacatagggtacatatatataaacccttttttttcacaacaccttattttctatgtagttaaactactatatgtgctgtcttggaggacgtattatctcttatgatgcatcttctgcgctgcttggagcaatctgagtaacagggcacatatttagagtagttagtttagctgcaactattccgggggtctcctgcatatcaaggtccttgggcaacattccattgggtagcttccagtcaaaatggtagagaagactagctaatgctagctccaagttggctagcccaaggtttatacccggacaaattctacgtccggagccaaatggaaggaattcaaagttattacccttaaaatctacacaattattttcaaacctctctggcttaaactcttcgggatcctcccagtaattagggtccctacatatcgcccacatattcacaaacacagatgtgccttttggtatatcatagcccatgacttgggttgtctcacgacatttacgagggttcagcaagggagccggggaatggagtcgcaaggcctccttgatcaccatcttgaggtagctcagcccaacaatatcattctctgtgatcctagtcttcccaacagcagcttgtcgtacctcagcttgtgccttcgccattactcttggacaccgcatgagttcagccaagatccaaatcaatactgttggggatgtctcgctagcccctgtaaacatgtcctagaaatagcatttgcatatagtcaatttccaaataaaaaaatcatcaaccaaattatgcctaagcagaatggaacaaccaaatcgtttaatataacatgagggaaccaaatagtttcaggataaagtggatgagggaaggcacactaggagagtggagagctgccaataagacaaaatataaatatcattccgttggaatgtgaaattatgtttttgattttacacactttgcatacaactgttcgggtcctaccattttaaatttgtaatcaactataaatctatattcagttcaattaattagtatcacattaatagtattagtacgttaacatgtccaaaacatactaaaaaggttttaaaagcaaagaaaatagccaatgtaaaccgcatgaatgattaaaattgaattagtttcaaatctatactagtagtctagtagtcgtggtggttctcccagcaaccaaccaccatttgccatatggggccacaaacaataggactagtgaactataggtcaaagctaaccactgaaaaatatgactaatgcaaatatgacattttttgattagacaattgaaaaaatgattttataaaatttatgttaagcaaatctcttaactttcgactaatgtaagtattatcccatgattaaaacaataggaaatggtataacaaactatatgatgatatctccttgcaaaatttcgttgcaatgtataagcattttaactacttcatccgtttcatattataagactttctagtattaacatctatataaatgtggataatgctagaaattaagtcttataatatgaaatggagggagtagtatatataaaaaacgtatgctatatacagttgtagtatatatgttgtttaagattagaagactagtaaaagtcagaaaaaaaaagtgcgcttctggccttctgccatataaaagagtaataggtactccctccgtcctaaaataaatcaacttctagatttcaaatttgttcctaaataaaccaacttctacatttttacctaccactaatccgcaaaacgagaaattttattacttcaatacccctcacctacccatcatttaataccacattcacattagttaagggcatgttggtcttttgtttctattcttaaaagctccttggactagggtttaatttatttagggataaagggagtatgtatgtagtgacagtagtgtgagtgtgacacttacaaacagaagcacgactatgatttcgtcggtaactgggaccggcgtgccaccttccttctgcagccgaagcaggacgtcgaggaagcagtctttccccgccgcagcctcgccggcgccggcggcgctgtcgtccatcagctggtccttccgttcttggatgatccgtcttatgacgagctccatcctcttgcggctggcgaggcccttgcgtggcgccaccgccaccatccgcgcgagcttggacgacgggaacaggtcggcgacgctgagccacgtgatctgcttcttggcgacctcgagcgcgtccaggaactcgtcgcggtggctgcaccggccgccgacggagctcaccatcacgatgtcgttggcgagcttgctgatcctctcgttgaggttcacgccagcgtcgccgcccgcgcccgcgtcggcggccagctcacgcacgagccgcgccacctcgcgctctcggacgccctggaacgacctcacccgggcggcggtgagcagctcctgcatgcagatcttgcggaggtggcgccaccgctcgctgtagggcgcgaaggtgacgtcgcggccgccgaaggagacctcctcgatggtggcggtgaggtggcggtcggcgaacctgaggtcctggtgcttcaggacctcctccgccaccgccggcgacgacacgatcaccgcggggacctcgcccatccacagctgcatgatggggccgtgcttctccgacagcgcgcgcagcgagcggtggatctgggggctcttcatcacgaggtggtggaggctgccgatcagcggcagcgtccatggccccgggggaaggttgagccttggtttcatggcagatgataccagcttggagaggaggacgaacagcactgataggcctagagccagtatcagcttgttgtcctccatattcttaattatcgatcgatcgtcggagttaattaggtgcctaattaagttgctagtttggatgccccttctatgtgcaaaggattacgcgttatttatactttcgctagtactacgatcgacgtcgatctgggactgggggagcaaaaaaatttgcttaatttatttatcaaatttgtcgacgtcgtcgctagtcggtccaatcaatctagagggtttagttattcttatcaaggttagaaatatccagacggagacaacaaactaatggtcgctctgatgacccttttgtggtgcctgttgcacactggtagtttttaattcaattgataacttggagattggcaagtttcgacgtggtacggaagtaaattctgagtgaaatttctaatgatttttgagaatttaaatttgaaatagtaaaatttaaaatgtgcgcccttaaaggttttcaatcgaggagcactttaattttttttataagaactaaaaccatatgagattttctaccacagctaatttaattaggagctaggtaggtaacaaatcatggatgatctaagctagattgattaataatcccatgcacaggcacctagctcccctccgtctgcaagctttgggtaggtggaaattaaaggcgcgcaactacgtattttcgaattgtacagtagccaccacaggccgtattcgtgcgctccccgtacaaaccaacaccgtcgccaactccaccgcacgaattagtcttcctaccatttagtcccggtttataaacccttttattttcgggttgtaaatcaggacgcctaatccgggactaaaaatgtttatctttagtctttgttaaaataaccgggagtaaaaataaatctttagtcttaaccaccaaccgggaccacggcattttatctcggttggttagttttttttcattttttttgctacttgcatttattttcatccacaaatccccacaaatcatgcacaacaaatcatccacaattcacatgcccatccacaaaatcatccacaatccacaagtcattcacaaaatcattcacaaatctaaaataaactacaagaaaatttacaaatcattccaaacatcttaaaacaattgacaaaatcctgctggtcaccaccgcccggcctcccttcctaccgaatctagtggcgggaggccgcccggccgccgcccgcaaccttgtgtgccgacgccgccgccaccgccgtggcttccgctgggccgccactcgctgtcgccatcttcggaggagggggagggggagggggaggagatggggatgaggtggagaaggaggggaggatgagagggggtggaggagagaggaggggaaaaggacgagggcgtgggattcggttggattttcggcattttttttagtttgggtcccagttggtataaacaaccgggattaaagatggatatttagttcctgttggtaatagactaaagatagtggggatctgacatgttttgaaccgggattgaaaataatatttagttccggttggtaagattaaaaaagtaccatgggtttttaaaccgggactaaagatatttttaatcctagttcttattcaaaccagagctaatgtgattttttcgtgatccagaaaattcatttttccaagtagtacatgcactcattctttgttccctccacctctcatctctacaaccaaacaagggacatggagtaaaaataaaactcctatccccaatccctctaccaactctctttcaaactccgaatatccttcccttctcttgtcaaacaagtcgtttgggattaggacctagggttggttgcactcctcgtgctggtggtcgtgatatgggtgcttcaaggtgggaagaggcgaataggtcgacgcagcaagcctgcagcgtgccaaaaaggggaacagtgccagttttttactgccacctgctgcttcgggcggttttgccaccggtgcaccagtccactaccactacttttatacattttataaattgacctttgatattttctgatattagacaataatctaatatttgtttgaatcaagtgaataacatatattcaaataagtatagacatttcacccatagtaaaccataggcaatttgttagtagttcaaaagatatattctgaaaccgttaaaaaaatatcactactagagaaactctcatctctcccggtttgcaatcccctgtagtcccgggttacaaacaaagagagagaatccaggactaaaaatggcgatctttagtccgggtttaaatacacgggagtagagatacatctttagtcctgattggtaacaccaaccgggactacagatagtaatctttaataccggttggtaacaccaaccaagagtagagatttttttcttttttttatttgcttgtggatcattgctttttgctatttgcacttggtttttcagcaaactcatccacagatcatctcccgacatcccaaatcattcacaagaacaaaatcatcatccacaatcccaaatcatccacaacaacatatatatactaaaaaaaatcatccacaaattaagagaggaaaaaaggaaaaaaaaagaaaaacatccgtcgcgctgcctcccctcccactggatccggcggaggggaggccgccgccgctgcccgccacctcctcagacgcccgcccacctgccgccccgccgccaccgaccgcccatctgatcgctcccgcccgccgccggcatgctcccgctcgggtgcgctgtgtgaaaggggagagagaaagcgcgctatctaaagcagagagagggaggcactatctaaggagatagagaaaatatagatacgggaggagaggataagtcctagggattatatagggcgttttagtcccagttggtaacatcaaccgggctatagttaggatctcaggactaaagatcccaggtgccctgccaatgtctgacacaaagggaaccgagactaaagatcatatatatatatatatatatagtcctatcgcacttataaactgggactaaaaatgatttcaagtcttggtttttggttgaactgggactattgtggtttgtgcccaacctgtaaaagatggtttctccagtgctgtataatggcatgtatccaattaactaaaaacattggtatctaataggtcttgttaatttcttgaccagccatggtttgattcaaactttcattatttctcttgatgaaattaaaacttccattatttgttttttaactgatcaaccacaattaaaattaaaattttaaaacatagtataaagttatctttttttctttgtttttttaaatctttgactattttacaaccttagcttttaaattttacctataacaaaatataggtctttttttttaattttttttctacgtctcatcagaaatagctgagccgaccagagacctggcctatctagacacatgctcgagacccagaagatactcccgagagtgacacaacttttcctggtcgctagctgctgcacgcaggagaaaattaagatacaaacgcgcgccatcaatattgaaatcggcatttgacccgggttgcatgtgccccggactgatcgatctatcatcaggtaactacaatcctagtgaacttcttggattcaattggatgatacgtggatgcggacacggaccgcaacgttaatttctcgttaaaagtcggaacgtccgcgtccgctagctccgtgaggatatttgataacagacgatcgacagcctcgttattttcttcaatgttttctacgtaaagactttgaaaaacgtatagtactattccatacgatgtacaccaatggttgtgtttggatccaaacttctaactttctctatcacatcaatctgtcatacacacacaacttttcagtcacatcgtactaatttcaacccaaactttcaactttagaaggaactaaacacaaccaatattaactagctagcactaagtgtcaggatgtcgacgtagcgccctgaaacaagtgagaaaaataggggtgagaaatcccaagctttatggagaacgcaccgcctcctgtaaactattggatcatccaacctctatttcatgtcataataatattctcttactcactgccatacatgcataggactagcagcactttttccacccatgcacatttatctatttatctttaaacgacttttactcacaacagtacatgtgtatagtaccagtggcacttactcacccatgcacatttatctctttatcttaatttaaaataatttttctcgtaaattactcctccaatcaattatttaattacatcattaaattcgctgtaattaaatctttacagcaagaccacacatagttatattccgatgaaaaatatatttagctttttggattctcccaaatgttatacctggctttatttaaatttaaatgtttcaacaagtatatgcatgatgtttaactagttaattaaaaaatcttgcacgtagaatccttaaaatgtttcagtaaatattttataatgtttcatgagctacgacttaatattttatacatgatataaaatgttataatatcaagtattacaaacatattgtatcctttcatatgtttatttaatgtctcacactcatttggattcattgtttcatataagtagttgttagtgttgctgtcattatattttgaaagtttcacttctctgaaacattttatagaactaactaaaacatttgaccaagaagtgaaataattttctataattggtgaaacaacattcgatttctcttgtcaaaatatatcgtgtgagatcttgttggaaaattttaattacaaggagtataatggtataatctcaatttagaagaaaaatccatttaaaattttatttaacgtatagtcatacatgcatcaccatgcaagctatgtcggatgtcacggtttctagtgtggcacactactagaaaaagcattttcgccgacgttttgtatatattttcgcaggcggacatgacccttagagccaaatagccgcctataaaaatacaaatcagggtgaagttcgctgtcctattttcgcaggcggaccacgcaaggtgcgcttgcgaaaattagcgtggtatatatatgtggcacatggtctgatattttttctaagtgtcatttcctctcccttcacctctcctctcccctcactctcctctcctctcccctcccctccccttcacctccccgccggcggcgaagggcggacggcggccgggcgcggcggggcggccgccgcgctcggcgtcggctcccctccctcccccctccagatctggccggaggggggaggggggaggccggcggctggctgcgaatggcggacggcggccgggcgctgcggggcagccggcggcggttcccctccctccctcccctccagatatggccggaggggggagggggaggccagcggccggcggtgaagcgtggaccggaggccggcaggggcggcggcggcggctcccctcccccctccctcccagatctggctggaggattgaggggggaggccggcgggggcggcagcaacgacaacggagtggtgcggcgcggctgctcccctctcccctccctcccagatctggccggaggagggaggggggaggccggcggcagcgtggatggcgacgacgacggcgaggcgcccgcgattttttttttttgctcgttaaatggattttcgcaagcgagccattgcctcgactgcgaaaatcattgattttcatagtcgttggctgcagacggtcctcccctctgcctgaaaaaatcacttttggccgtctgcgaaaatactttttctagtagtggcatatattcaaatctccatacgttaggagctacgcccaatgcgtagtctcctcaaagcttcaatttctacgtgctgtttcctctcagtttgccacatttttccttggtttatcattattatgtggaaattccgaattccacgctagatgctagtgcaattttcatggtttatactactgtaagcttatttagaagaattcaaattaactaacaagtaattaaagagtacgtctagaggcagagacatatggtttagatgaaattagggataagaaaatcccgaattccataggacgaggtgagctagcccatcacagagtaggactaataggatttttaaatttttaaatttatttacagaaatatttaaaaatagctttttcttcaaaattttacaaatctacacccctttcaaagggtgtttttttatggcgtgaaatggggttggccattattagaggaggacgacatgggggttagctgcaaaatggctattagtggcgcctaatcgctttcagtccttttcaaaatgaccggccgcgggcgaaaaagcaccctttgaaagctctcccatagagtgttttaggggtgtagatttgtaaaactttttaaaaaatatatttaaatattttgatgaataaaattaaaaattttgaaaaaaaaaatcctaagattgattggtgagggctgcgcgtagtgtagttgacttgtccgctagtgaatgaacggccgcatgggcgaagcccaagtgcacaagcacccatgtcgattttccttttcgctaatccagtccattttattcatatgtgcaactcttacatccaattccgtccacctcttgagctccacatggcccaaaaggaagaaagacgcacagcacagcacaacggctggtcaagaaattaacaagacccacaggtcgttttttcacgctacttttcttgctacaacctgcatccattatactacctccattccaatataagtaagttttggaatttcatgtacaacatttgaccatccatctaatttaaaaaaatataaaaaaaattaaaaagtagtcacagtactatttatattttatcatctaataacgacaaaaatactaatcataattatttttaaataagacggacggtcaaacgttagatatagaaacccacaactgcaattgggacggagttagtacagaattgttgatgtcaaaatttatccgaaaacagagcaaagtaatgatttgaaggttgggagtgtcgagatttatcgaatggcggtgttccgagtttcgggcaagacaaagatgacgccatcaccaatatagagaaaaggatttcggtgtacccgacctctacatccaaccggatatatgcagcctttttaaattaggaactaatcctatcaaacatgtaacttacccctcaactaacgaatctgaaatttgcttttatagagatttaaattcaagaccttagggtgttacttgggtcactgcaaccactatactacaactacaagtacatatgacttctaatatcaattaaatactaatatatccaattgagaggcttttagtttacgtgagcttaaaattacatttgtcagtaaacgatagcaaaaaaaaagttacatctaacatgacaataaattaaaatccaacagatttagaagcaaaataaaagtttggatgtgttttttaatgtgggttgggaactaatccccgttcacagaaaacgaaaaggtagattagcactaattaattaagtattacttccttcgtttcaggttataagatattttgagtttagtcaaagtcaaactattttaagtttaaccaagtttataaaataatagtaacattttcaactcaagacaaatttattataaaaatatattcaattattgatttgatgatactaatttaatattataaatattactgtatttatctataaacttaatcagacttgaaacagtttgactttgactaaagttaaaacgtcttataacctgaaacggagtagctaaataaataaacttaaaaagaatgataatttattataaaaaatcttttttaaatgaatataccgttttacaatttgaaagcacaaaggaacctcaggaaacgcccatgacctctgcaggaaacaatttgtctgggctggcccaacactaactagccaaccaggtttccaggcccggcgcattatgcacgacagctgtggcccagcacaacttttaagtcacaaaaatgattggttgccagagatttgaacggacgactgcctctactcgcagggtgcaatggtgcacacaccatcgagtaggctaaatataagacacctattgtttttaggacaatttgaccattcttttcaaaaaaggaagctcctggttgaccctatttccactcatccgttaaggtttgattttaaaaaagaaaaaaatatgattattattcataatgcccaaagtaccctcagaccctatccatccaaacctatccatccgatccccatctctgtctctctcgggcttcaggcggcggcctcgggcggtgcggcggcgatggcggcgtctagaagccgacccccgccggcgcccgctcgggcttgcggcggcggcggcgtctgcgggcgctctgaggggcaacagcggtgtgaagccgacccccgccggcgcccgctcgtgaacgtagagggcggcggcggtgggatccgcaccggcgcccggccgtgaagggaaggagcggcggcggcgggaagtggagaaagggagcggcagcggcgttggacgacacgacggcggcgactgcgggtgctttgaggggcggcgacggcgtgaagccgacccccgccggcgcccggccatgaagggagggagcgacggcggtgggaagcggaggaagggagcggcagcggcagcggatccccagcggctgcaataacggcggcagtaacggcggctgcgcgcgatggagcttcgcgcgcagtcgggggtagcgacggtggctaccacccatgtgtccttggattcgagcttggcctccgccggcgccgcgtcgtacgtcttcgggctcgacctcgccgttcatctgcacgctccccgtcctgaaggcgtcttcttcttcatcctccaaaagacagagatgccatggccagcttgagcttttggaaccatgccattgcaacttcagctatttggaaatatgccattacaattagcgaaaccggttgggtgccatcgcaatttcttccaaattggaaccatgccattatgtacgtctgaatcgccatccatgccgtttgtcctcgtaagtatttccgtatggacgcttgtgcccctggctgagacgatacaagccagccatcccggtccggctcaaccatctctgttccccattccccattccccattatctgcaaaccctagcttgccgacagcgatcggtgcagcgccggcgatgatgacggggactagggatacggcgccggtgacgacgacggggctagggatacggtggcagctgtaccgatagcttctcccggcgcagacggatcaacgcggcaacgaggttggaggcggcgatggaggcgagctatactagtggcggtggtcgctgtgcaatttcgagaaggtgcagagtcccattggtggctccttcaatcccagagctgaaatgtgcttgtgggcatgccgttgcggtgcagacatcgaacacaccaaggaatccaaggcggcggtggctgcagtgtcctggggaggtgagaatccagtcctacttgtgcatatttgtgtgtgattttctttctgaatctaatatggtttccttcttgtagaattgtagatgtgccttgtggatttgggaagatctcctcaacgaatacgttgaggagatggtcgcttactgtcatgctggcgagtacgactatcttagaaagacatgcgacagtttgaaaggagagaacatcaactgaaaatctacatgtaaatacgatgaaatacccaatgcacttctacttcagctatccaaggagtatattcgagttcaagttactcacggtatcgacgaaataggaggaatcgagcctctcagatccatcccctccatcggcaatttcgctgcgcacgatgatgtcgcaggggagcttgcgatcttcaggggaacttctacatcgtgggtcgtcgtcgccggcgccatatccctagcccccgtcgtcgtcgccggcgctgcaccgatcgccgtcggcaagctaaggtttgcagacaatggggaatggggaatggggaacagagatggttgagccggaccgggatggctggcttgtatcgtctcagccaggggcacaagcgtccatacggaaatacgtacgaggacaaacggcatggatggcgattcagacgtacataatggcatggttccaatttggaagaaattgcgatggcacctagccggtttcgctaattgtaatggcatatttccaaatagctgaagttgcaatggcatggttccaattaaccctattttttttggcttctatctatgtgcttcgattgattgatattatcggacacatgtggttcagactagattccaaggtgtggttgtttattttttaaaaattctatcaaatttaagtcgagtttgtcaaaataattcaaatttgtcaaatttatgccaaatctgtcataactgtgtcaaaatttgtttaatttattttgtcaaaattctgtcaaatttaagtcaaatttgataaaatgattcaaacttgtcttcaatataaaacttatgcaaaacttattacaaatatgtcaaagtatttgaatatatacacggtatgacataataggttcaaacaagcaagatataatcgggtcaaataagtaagggtaaaatggagttaacaccgcgaactcacctaattggaatagggtaagagaggagctttgtttttttgaaaaggagggtcaaataagcaaactctaaaaagtatggtcaaattgatagatagagttcaaaacagggtcaaataaacaattgccgcattatttttttatgtctcataatataagcgtgcatgcttgcatatattaactatcacctattggttctttcaattggtttatttaaattttctaccatcaaaccccccactcatattgcttacatgtaccgatgttatccaatcaaaaagatgattgattttttttcttgatctttttatgttaggagtgattgagtcttatattttgagatgatggagagttgtactacttgagtagcacgtagggctgcagcatatgtaaaaaaccagactcatatgtgaattgtggaatgaatgaaatgtaagaatcatccatcacatcgcgcgacacccctggtattgtttttttttttttataatggagtagaattccaacccagcatttgcttaagaagttatagccaagtattacaccaattcactcaaagggagcgcagttcaaagaaaacttataaaaaacactcccaaacatgaagcaaacacaaactaatcaacactaacgcaagataaagagtatacagttattggatcctatttatctcaaccctattattgtactgtacaaaatatgaaagaagaagaagcaggctgagcgaaagactgaaagccagagcagctaacgcacaagaggttattgttttggtttttttttggatagaatagctttcgccggcatggcttgcttattacaagccctgcacatagtttgaccgttgtaaaacttattctataataaaacatacaaagcgaagcttttgaatcgtttagaaaaacaaaatgaacaatcctgtcaagactgccgcttggacgtatattgcttttaccatgatctctattggtattattctaatacgtactaacacaaatgttttggtctaataatttataattggtatactgatattttctctcccactatgcaattgttatttatctttttagatttttctttttgcacgaaatagaaacggatcgcacttgacaagactttctcatagtctcatagacctagtggaagacacgctgcgtctgtcactgcctccgaccgataatgctctgtccccactggtggcactccttggccacactgctcccttccttcccttctactcttctagctatgcacgacccatcttcgccgcactgggaccatcaacttaatattctaaaaagcaactaattagtagtcagcttccgagaatatgaagaagttaaatttctcaactttcaacttttagtttattttatgaattctagagttacatattctgacaatttagattaaaatctaaattgttttggaaagctagagctactgggagaagctgtaatttctagaagctctttcaaatatgaccttagccttatagcattatcatctgtctatccctgtacgccatagatgaaaaaatggactggtgggtgacccggtcaacctttcggtttaccggtcagacggtctgaccggtgaaccggagatctaaccgcggttcactaatgatagaaaagatttatattcccacaaatcaactctaataaaccaatgtctagatggctaacggaatttgcttcgacccatccactagaggtctactccccaccatacctcttttcttatgatttttacattacacaaaaatcaagttgttgtgagccttcgagttaactgggcttcttccagcccatctaaagcagtccattgggtcaaccgtcgggctgatttggttttttccactatgttggttctttctttcgggttcaaccgtcggaccggtttcatttttcccctatgctgtacgcttagcatttgctggcggcacggcttgccaagcagagttaggaaagagacccacctttgcggatgacccaacaatttgttccttgtcttacgagcaatggaaattaattaaggagatgctttgcttctaaatattatggttgtgtttgctttacgaggattaagttgtgattttcgtaagtcccaattttcgatttgcaacatctataataactagaaaaaatacccgtacgttacaacaggtgaagtctattttaatcttattattattatatagtttagttaagatgaaatttattgtggcagttcacttggatatatatatttttagaaaatcatgagctatagtttggagtccgatcgtctcaagttagcatgcgagtttttttaaacagatttcttatgtgattctttctgtattactaaaagtgaatgatcttaaaaaccgactcaaatacgaatatgtatttctaaaagtaaacaaacttaaaaaccgactcatacagatgacataccaaaatactggcaaaaatatctttaatttttataatagtagagatagagattgatggttgtagtttcttgaaagtaaaggccaaaataaattttattatctaaaaattccgtatgcaatacatgattaatggtaaaattctgttcaagatttcatattactagaaatacggagccgacggaaatgctacccacaacggcacctaggcgccgtcgccggaaacaaggcgattgagctccagcccacctacgaacaggcgaagcacctatttctatgaacaattatatccgtgtttctattaccattgatgttataaatatattttgtctatttaatagaaaatagaccataccataccatcatactaaaacgactatccaaatttaaatatttttatctaggataatagactgtttaaattcaattgcagtatgaagtaattggatcttacctaccaaatgtttaaggattacgagacatatggtactgctagtatcttatagccttatcgctcgatccttggtaggcttagatttttggtgtactgtttgaaagattgctaactggcgtgcgtgagccagcaatggacatcgcgcgagtgccagttgtcacctccggcgttgtttcttttttttcgattttctcttttttctttggcgtgttactttttggcgttatttattatttttttaatcttcaacacacgtactttcaaatctttgggttgaaaatttttaaacctgagttgaaagtttacaaaatttgtcttacaaattcaaatttcgagtcaaaaattttcaaaatctgagtttaaaagtttttaaaattgacttcaaagtttaaatcttaagtcgaaagttttaaaatctagcttgaaagttttcaatttattagtaaaaaaatctccaaaaaaaaaatcttgtcttaattctgtcgttatccttaactaactagttagttataaattaattcgtcgaagcgcgcgctggcggtgcgcgctagctagtttttctggtactaattgttgctataatactttctctacatgggccaactcattgctgatccataccaaggcccaaacaagcaacgtatatgaagaatacaaaaggtagcaacatgagaactttaagaacgaacatatcaattggcgagcgaaagctcttggtggcggtggtgacctgggtggccggtggctcccttgtcgatctctccctaccttccttcttcccctatttgttctagaagcttctggcatcatccaccaattgtatctccctagttgttcccccatccaattctcccatgtgtattagactttgctgctacttatactactggattgtcaattgagttggtgttgagatcgctgttttggtttgctaacacattgtcaatcaacaatcaatactcacaggttagtcccccttcatatgaaaatcctgacttgaacagtggtgtaatttgttgtctatgtcaaatgcataacagtgcataagcatgtggtgtcacagtttaatgtttattggttccagcttaaatgtttattgacataccgccttgtttccggctttattggttcaaatagtcgtgctttattttttaatgtttgggtttcatatttttttggtactaccatttttagaatattatttagaaattaaatatattcttttcatgtacttccagtcttccataagtttcgctatgaccggttagtaaaagatcctacgaaaaggacaggaaagaataactgtagtagaataaatggacaaacacatgagatgaaagagacatgatatatatcttcggtgaatgttccttggtgtggggaggaagagtaggcaaacatcagagacgtacaccacatggtagagttaattgacctgtatcataagatcgtcttagctagcttatcaaccacagccaagtcgtttaaattttagaacttaaatactttttcagtttttagttgtaatctatttttcaacattagcttttaaatcacaaataatataaataaaaaggttctacttataaattagtatatattatcgctttgttcatttttccacgacttatatattaacggcacaaacgaacaaccaaagcagacggtgttcttttagccgctgataggcatggcgctttgctccatgcttttgccatcgatcatcgatgggcgattgggcaaattgttaattctgttaattgatttgcaaattgcgtccttcattttcctattgaccattaattaaattaacaaggagctagcgacatctaattaattaagtgacatatatagaccggacgtcgtatagtacatgtcacatgttctcaactttctgcacgcgtggttgatcctgtgcttctgcgttaatttaatttgcttgtcttttttcatcgacagccgcttgaaagaggctccacgagtgtctagacggcccgaaatggtacgggcagtcgtgacagccgatcgaagaacccaacgcagcacatgttgcgactcgagcgccggccggcggtcaccccgaaattaatgcattgtaggacctcggttcatttctttcgtgaaatgcatgctgattctataaagtcaattaaacttgaaaggattttacaaatactcgtcttagggtataagtgtatgattgtatataaatgtgcataagtttaccccctataattaaatgtatgcatgcatattttttataagagtcccactccggtgctctcgatcaagtggtagtagaaagcaatatgaaccattagtctcatttgatcgaaggattcagatctatttctactaccatctcagttaacggtagtatgaatcgtcaagggatattatttgtctagaaaaaaatatttgcggagaggtatacttatcatttgcactcactaaccttagtagcccacgcactgccgccgctgcctggaacggatcggaggtcgctatatcgatgctcatgcgttcaaaatcggcgcagatggtgggttaccggggatggttggaggagaagaaaggggcacgccggagtgtgtcgtcgccggcgggatcaacacgtgccgtcgggcggaggacttgccactcgccgccgccataacttgcgatccaatttaatttctcgatggaatcgatatggacgatgcgccgagctagccacaggcctgatggcatcgacctgccgacccatgaggtgaaaaaaggaaaatggctaagttacccttattattatattaataaattactaatttattcttaataatgaacgtacagatcttttctacttatagtataatagagagcaccggagtttttgttttacaaaacatgtacagcacatacgtttataaaaatatatatattatactttataaatatcaaaatatgtaggcccaatctttaaatgtgtattttaattatagaaatggcacatacgcaactacattaatataaaaaattaagaaactttgccatattgaaattttccgagggcagtagcggcggaagctttcgagcggcactagatcgctcgctttgatatcatgttgaatagtatagacagagataaatgctgaatagtatagacagagataaatgctgtgaatattgatacatgttgtattaagcctcgggggttggtatatacatcggatagagataaggaaagctaggatacaaatcaatcatatcctaatacatttctaactaccatatagtctaatactctatcctaatagatttctaactaccatatactctaatacgctaatagagtgtagtatactctaatactctaataatggagtgtagtataaacaataacaactactacgtactttgtacgcgagatagtaagcagcctgcgcgtgagagacaggtaggcttgaattctatatgttcatgtgcgtattttgtgcaaaaaatcttgtgatttgtaagttgttaaaaaacgtcactactacagatccgggcttcagtgacgggtcatctgtgacgggccaacgcaactcgtcaaagatgagtcatctctgacgggccgaaaaaatatcctcttcaatatatggctaccagggaggacccgtcacagatgtgaagtcatctgtgacggcttgcacttgtaacccgtcacagatcgtctgtgacgggtcacaaccatggctcgtcataaatgacatgtcatctgtgacgggtgtagtattatgaaccatcacaaaagagaccactcatctctgacgggtctttaactaacacacgtcacagataacgttatctctgacgggtggtagttatgacccgtcagtgatgagtgaaaattcaaatttttaaattttgtaaaaaacctcggattgaaacatgtcctatataaaagttgtagctctcaatgatatccacaactttataactaacaacatttctattagagatcgtttacatccccgaagatgcattacaagtgatcagatctaacttttaaaaacaaaattttgagttttttttcaaatgacatggatggatacatgccccgtatcaaagtcatagaactcaatcagatctacaacattataattgaaaatattttcatttcacaaaatttacatgttataaagtgagatatattttgaaaaatgaaattttgaattcttcaaacaacatcggatgaagatattttctacgtaaaagttataaaacacgatgagatctataactatttagttgataatattttcatttgaagtcatttagggtgttaaatatatgttaaatgattcagacaagcatagacaaaataataacattgggttagtagtcaatatgtgttgagtaggtgagttggtaagggagctctatatggaggttgaggtcttgagttcgaatctcacttgtagcatacaagttatattgcgtgaaaaattgtgaatttgtaggtagtgatgtgtaaccatgtatatgatggctagtaaaattcaaaatatttttttgaggttttttgttgcgtttaaaattcaaaaattgtatttcttgctttgtcatcagtgacgggtcgtaagttacaacccgtcagagatgagtcatcagtgacggtcaggtagttacgacacgtcactgatgactcatctgtgacgggtgacaagttttaacccgtcagagatgacttatataccggtcagagatgggttatctgtgacgggtgtttcatccgtcacaggtgattttgtcatcagtgaccactaatcactgaccaagaccaaacccgtcaaaggtgagggtttggccccgtcagagatgacctggtccggcgtagtgcgtatagaggcctaaaaaaatcttggattattttggcatataaaatcaagtcaaaccaaaattaatttgggtggatttgtgctttaatcacgaccttggttgggaccctatagatgaaaatacaagactatctttgataccattgaaaaagacattacacgaggggaaaaaaaccaatcacagataattaaactactacttccgtttcaggttataaaacgttttgactttggtcaaagtcaaactgctttaactttaactaagtttgtagaagaaaataataacattgtcaatataagacaaatttattatgaaaatatattcaattattgatttaattaaattaatttagtattataaatattattatatttatctataaatttagtcagacttaaagtagtttgactttaaccaacaagtcaaaacgtattataacttaaaacggatcggagggagtatcaaacactactgcaaaccccaaatatgtacttcaaattggtttcggctaaaaaactgggttcccaatcagcagcaataaaaatttctacaccagtgaaggtcccgacacatgtaatattggtcaagcacatcagtgatgaccatcgacttatttatgacctatatgattcgatcgttgctaaaaattcgtggaataatctctcagtgtggacactttagtcatggaggaacttcctattcaggcatgtttcactcatttaatacacaatccacctaacattgagagatagatcgagatatctgattttgcatacatgcacgccaagatattgacaaaagacatatacctggaaaaggacggagaacttatgtcgttgtgtgctttgccctgcccatttgatgtgcgacgagcttccattcaagattgatgcaagtccctcttaattcaagcgcgtgttcatcagtcacctaagaggccaaaatgaatttctctcctctctctctctctctatatcccctactcttttcacactgttagacccaggacacctataggaatatttagtttgattccctcacaaataaataatctctgctcataaatatttagcgtttagaattagatttggtcgacctttcaaaaattaattcggctataaataatgttttatgatgcttagtttgtaaaaagcaattatgtatagttttgccttaaaattacaaccatatataatattatatttgataaaattattttaatgtaaaattggtggttagagctttaaaattttgactgaattttatcctaaatctcaaatatttactatgactgaaggaggcagtaaaatattcttgctttccgtagggccacctccctgcaaatgtttggttacaaactagactgatgccttcctcgctccttctgcattagtagcactgccatgtgcatattgagtcaatcacaaacatttctattttttattaaaaaatatcctcttaattaagaaaaattcaatttaccctgaggttgtactcagctacgatattaagcaatttcctccctcagctcttgaaacatgataaatttttttctctgtggtaaataaggacaatatagaaatagattctctgcagtactatcctctaacattaagtgactgatatgtgggtcgtacaccaaatggattcacatgcagtaacctgcgggagcaggtagtactgtataggagactcgtcgtgacagatagctcgtatgccatctccttttcattttcttttgctttcactttcttcctcttagggtgtgtttggataatgggaaatggggggttggattgggattagtaaatgaatgaataattagtattaaatggaagaggaagaatgaatggttaggatttaaagatgggtgggaaatcattttcctttgccatttgccaaacattaccttagtccttcctacttcgcaatatccctgtgacatggttagaaaatggggacagtagcgggaggcgtccgattatccctccatagcttcctcctggtaaatgagttctgtttttcttttctatattagtgatcagcatcttaattacttacacgtactatgcctatagaagtgcggtgttcaataaatttcttggtccgcagattatgcaaatgcgccagtagtaatggcaacctaagatgaccgctgctgtcagctgtgttgatttttccttgatcaagcaaccatccgaatattttgcattgctaattaggaatgctggttgacatgaaagaaagaaaaagaggagagacaaaacatcgttgttatgcataacaacgtcttaacaatgactcttagtcactataatatggaaatatggttgcatgaaggtaaaaaaatggaaagaatattaacaaaaggaatattttttaagttaatgattagagcctttgtcgtctcaactattgtaaagatacggtctctaaataatatttattgtttaagagaccatactcgtctctaccattgaacatgccctaatatgagctctctacactaattaatgtcattagagactatcatcctacaatagtagagacaataagatttctaaaccattaatgcactaaataattttttattatacttctttccttttctccaccctcatacaataatttttccattaataaatgctaagatcgtcgactctgagccgttgtcatgcgtagcaacgatgtttcttattccttccctctttttctttaacgtcatcaaatttacttgcataacaatgaagagagcctgttatttgacaccattgtacatgccctaattactaaaccccgtttgtcgtcttaactactccatctgtctcataaaatatagctacctttaaaacttttttttcatagggattaaggcagtaggtgaaaataaatggagagtagttttgattgattgagatgatagagtgtttgaagaaaattaaatgtgaaattatataatatgatggatttagatgagaaggtaagttattttggagaaaatttaaatattaaaggcaacacttttttggaataaaatttaaatgctaaaggcacatgtttttgggacggagggatcgagtagcttatactccaccatttccacaaatgaagaatttcacgattattaggaagtgccaaaattattagtataaaattaagggcatcgatcttaatatgagtatatgagttaataatatgtatccaatattaataagatactcctcgcggaacataaaattactcaaaataaataaatacttgatattttgtatatatatagtccaactcatcaatggattttgaaatagttagtttgaaaatatagagatggtgtttaattgtagatttgtgttgaaagtagttttataatcttataaaaaacttattagattttataaattaattttagtataaaattatgataaaaggtatagctcgattaatatgaaaaatcaaatgtcaaatgcttttacaagagggaatatccgttagttaccaggatatatcaagctaagtcttgttcttttccatgtgaattaatgcgttattttccatgcgtgctgccactaagctagatgcctagatgggacactttctcgtatgttttctagggttttttgggtatatgttaggcaccaggcaactttttcttgaaggaagacttagacaactattattacagtacctacagatgtaattctaacatgtgattagttttttctaccctgtcaacgataattacagtctacagacgtaaactcacaaaagtacgtactctgcacgacgacatcaatcaatggttttcttttttccagattttgattgattggcctaattgttgttgggcctatagaattacatagtcgtggacatcgggctaaggtggtgttttaatccatgtcacatcggattggatattagtttagagtattaaatatagaataattacaaaactaattgcataaatgagagctaattcgcgagatactttttaagcctaattaatctataattagcacatgtttattgtagcatcacataggttaattatggattaattagactcaatagattcgtctcgcgaattagtccagagttatggaatgggttttatcattaatctacatttaatatttctaattatgtgacagtgactaaaaattagtccccctatccaaacaacccctaagaccgggagggggtggaggtagaaaccgaaagtcctaccacgcgagtgatcgcccggggcgatcaggacgtgattcccccctcctctacgtggtttccttttttggcaccgcattactttactattttagtaaatttatgcatctaaagtttgtacatctcaagtttacacatataaagtttattcacctaaagtttagagacccaaagtttataagtcaaaagtttatatatccgattcaaatttgaatttgaatttaaatattttttatatatagtatttctatacatataaagtttatatacctaaagtttatatagacccaaagtttataagtcaaaagtttacatacctgatccaaatttgaatttgaattcaaatatacccgttttaaatttgaagttgaattcaaatatttttcatatatagtattttctatacataaatttttacaactttgtttttttatttatttttaaatttatggtgtagtaggaagagaagaaggggaagaggaagagagagactagcatataggggggttggggggtgatcgcccggagcggtcacccgcccattagcacacccccggtagaaacgacaatgaggactttgataattaggtgatactcgtgataccggtttctttactctacggctaaatcactaggtttagtcttaactagttgtacatgataatgcgtgatgtttcattttctttttaaaggtattatctgagtcaaagtttgtctgcggaaaaatcttatggtcttgtctttattgatttggaccatgcatgacaacaagtataatatgtacgcgcatcattctattttcagaggtgtcacttgggaaaaacattattcatagtctaggtctagactcagtttaaaatagattattaagcatattgttgttgtgaattatctataagaataaattagatattttgataaataaacttaacaaataagttcaaacaaatgatctaagcaacacggtagtttttttagaaaatatatttcaagtcaaatttaaaaattcaactgtaaaattaaaacattcaaaagttctaattaaaaatttaaaacttactgcaaaattaaaactttcaacctaaattttaaaactctcaacttaaaatatgaaatttaatttctacccaaaatttgaaactaattttaactcaaaatttgaaaacttgaactcaaattttcaaaagtttcaattctatcgaaacttacaactcattataaaacctataactcatcttttagtttttattttagagaaaaactagtggacggaatcccgtggggacgggatacttgtaacgaataatcccaaaccccaaatccgtttcttctccaccagatccgtttctcctcctcctttctctccgattctttctctccatcttccacctccctccctactcctcgtcggggtcggggtagggccccggcggctccgcctcctactccgcatggccccgccactgcacgcaccgcctctactccttctcctcaccggtgtcgccgccaatggcccccggtcatgagggtctctcccggcgaaggtgggggaggcagaggtggttgtggtagtctcgtgggtgccctggagaagcgtctgattatgggggtggtggcggaggaggaggaggagaagggagcgacaacgacattggagacgaggtggccaccatggaagtaagtcattcttgactggtatcaggaggtatcacggctgataccaagtatcatgcctggtgccttaggaaaacatggctgatacccacaagtatcagccctggtacccaggtaccaaggtctgatacctaggtaccagctggtacccaaggtatcaggtaccagccagaacactcataggtactccctccgtcccaaaataagtgtagttttatactattcacgttcaacgtttgaccgttcgtcttatttgaaaattttttatgattagtatttttattgctattagatgataaaacatgaatagtactttatgtctgattaattatttttaaatttttcacaaattttttaaataagacagatggtcaaacgttgggtacggatatccacggctgcacttcattttgggacggaggtagtaccaggtgtaaggagggagatatcatggctgatacccacaagtatcaggcctggtacccaggtaccaaggtctgatacctagataccaacctgtattcaaggtaccaggtaccagccagaacacccataggtaccaggtgtgaggagggagcgcatgccatcgtcgtcgtgcccggccaatgaacctcttgctgccatttgctatcctctcattccttctcctcctcgacgtgctttctccctttccttatgttgatctgcctagcaagacaaggagaaaagacgtggaagctcagctatacaggagaaagaaaggagaggagtcattttaagtatcccgttctaacaggatcccgtcctctagtctctctctttattttattatgaaagttattaataatgtccctaactcgatcagcatttatcatcgtaagttaacgtgcttagcattaattttggcgaaccccatgccgaatcgtcaggggatgcgaaggacgcatacatatgaccttaattacctcctcgcgcgtgctccctccgtccaaaaaaaaagataaatcctgggtttccgtatctaacgtttgaccgtccgtcttatttgaaaaaaatatgaaaaaaattaaaaagataagtcacgcataaaatattaatcatgttttatcatctaacaacaatgaaaatactaattataaaaaaaattcatataaaacggacaatgaaacgttggacactaaaacacaggatttgtctttttttggatggagggagtattagctaggaagctccccttcgttccacacaaactccactgcacaactcttaattctgttaatgattccactatgggttcacgcacaggtagctcgatctttgactcatttcactcacactacatctcctagggaacaaggcatccggatcccatcccattctaggacagtgcatgatattggtacagctacaaacctagcgccaagactctgaagatatattacaacgtcgtactatatatgtgtatcaaaatgtagcattatagtatagaatagaacataacctagtgttatatataaatctgaatagacttctatacagacaaaatataatagctctactagagaagatatttttgccaatgttgggtatttttttcgtaggtggatatggttatcggagcgaaatggccgtctaaaaaaatgtaaactgggttgaaactggccgcgaatccttaagcggtccatctacaaaaataccctttatttttgcaggcggacctattatgtggtccgcctgcgaaagttagtgtgggatataaatagacttgacatgaggggattttttttctaagtccttagttctctcctcctctccggctctccctcacctctcctcttcctcaactctctctccctgatcaactccctcagcgactggcggcggggggaaccggcgacagcgaggcgagctgaggcacggggtcagcagcgaggggaaccgacgacggcgaggcaaggtgcggggtcgcggcggcaacggcgaagtgccggccgggatggtgatggcgacgaccagtcagcgcagctcccctcccctccctctcagatccggctagaggggggaggggggaggagaggtggcggcggtggcggttctcctccctccagatccggtcggagggatgccgagggagggcggtggcgacggcggcggttctcctccatcctagatccggccagagagagcccgagggagggcggcggcggtgcccctatagttccccacttctcctcacctcctgtcggtggcggtgccccccaaccctaaccctagatcggtcggaggtgggtaggggcgcggtgggggtggcagcgattttttttttgtttatggagatgatttttacaggcgggtgactgggccgccaggcgattgctttcaggcggactactcccccgccggtaaaaatagtttttggccgcctgaaaatactatttttgtaagagtgtagtttagtatagaattgaacataaccgagtattataaatctgaatatggcttctatactactacatgtctacatctgtctaaaaagactgcagttttgcactgtacatgtccaacatttaaccgtccatcttatttgaaaaaaaattataattagtatttttattgttattagatgataaaacatgaatagtaatttatgtttgactatttttttaaaaattttttatgaactttttaaataagacggacagtaaaacgtaaataaacaactacatttaaaatgacggaggtagtagtttggtattatgggatggataaaataaccaccgtgttagcgagaattgaatcttggtcccagcaatgatgacaacccgacagtctattagttaggagcgtatcacgtactttacgaacctctcttctttcttcatcttttcaattaaagctttacaacctaatataacacacagcagatatatatgtccgagataattattccaatgtgatatacatgcacacgtgtgagtcgtcgcacgagatggaaatttcacaatcacgagctagactaactgcaccaaagctccccctacgcccgtacgtagccgttgcccggacgggatctgtaattatatgcaatgctatcagacgacgacgggatctagattttctagagactggtacgcatgccatcagacgacaggatctagcaatcgacaagtcccggcctgcaggttgttcgcaatatatatatatatagagcagcgcagcggcagtccgagctactacgccgagacagtgtggtggtgagccggtgatcgatcttgcatcttgcgagcacacgggattccagatcgatcgagctatagctagctagctaattagttaccacgtacgaacgagtactttacaactcgatcagttcatcaaattaactcgatcagtggttaagtttcgcacgacacacgcgcgcggatcggaagccatcatgcagatgcaggtgctcaccgctgcttcttcgctccctcgcgcgaccttgctccggccggcggctgccgagccatggcgccaatctttcctgcagctgcaggctcgtccaatccagcgaccaggtaataattaatactccctccgtattttaatgtatgacgccgttgtctttttgaccaacgtttgacaattcgttttattcaaaatttccatataaatatgaaagtatttatatcatgcttaaagaacatttaatgatgaatcgagtcataataaaataaaataaatgataattgtataaatttttaaataagacgaatggtcaaacgttgaataaaaagttaacaacgttatacattaaaaaaatatggaggtagtaagtatcaactattcatcatgctgcgcgtgcattcgatcatatcctgatcgatcgatgacctcaacgaacggggcgtgcatacatgcatgcttacctgtgaactgttctactgcacacgttcatcgcacgattcataaatctatcgatggaggtcctgtttcgggtgtttctgataactacagctccttccagaatctcagctagctctcttgaataatttatttttacagtagattctaagaatttgtagctataaagtaaaatctaaaattgtaaaccatatatcagaagctgaaaaatccggtccttttaaattattttcggttggctactggtcagctacctctcagaaggcaaaacatagtctaatatccatgcctaattatctttcaggtatcatgctacactgcaaggcccagctacaggggcaggaaacgcgcgagcgtcgtcagctcgacgacgatgaacacgctagaccaccacagggcggcgacgacgacgtcgcagcaagcaccagcgagctaccctacatgatcgagtccatcaaatccaagctgagggcggccaggaacagcctcggcgagaccaccgtctccgcctacgacacggcgtggatcgcgctcgtcaaccgcctcgacggcggcggcgagaggagcccccagttcccggaggccatcgactggatcgcccggaaccagctgcccgacggctcgtggggcgacgccggcatgttcatcgtccaggaccggctcatcaacacgctgggctgcgtcgtggcgctcgcgacgtggggcgtccacgaggagcagcgcgcgaggggcctcgcctacatccaggacaacctctggaggctcggcgaggacgacgaggagtggatgatggtcgggttcgagatcaccttccccgttctcctcgagaaggccaagaacctgggcctggacatcaactatgatgaccctgccttgcaggacatatatgccaagagacaattaaagctcgcaaagtacgtgttacatacttcctctggcttttaataaatgattttattatcttatatatacacacacatatatatttgatcactcgtcttaataaaaagtttacgtaattattatttatttttattgtgactttatggttccataaagatccttcaaacattacttacatgtcaaaaagagaaaaaaaagcattacttacatttcctctatatatatttacctaaaattcttaaataagatgaatagttaaatgaaagtttcttaaatatactaacgaaattgaaaagggaaaatttacaattcttaagaggtatcaagagatattaaaaaatttaatgtaaatttggtatcttctaatactggagatactaattaagagctacaaaatattttacactagaaaatatagtactatctcccttagtatcactttctcaaaaaatgaaaatatttaatgatctatatgtctggaaccattagttaaccagctgtgacacttcgaaattaattgcaggattcctagagaagcactgcatgctaggccgaccaccttgctccatagcttagagggaatggaaaacttggactgggaaaggttgctacagttcaagtgtccagctggctccttacattcctcacctgctgcgtcagcttacgctctcagcgaaacaggtgacaaggagttgctcgaatacctggaaacagccatcaacaattttgacggtggaggtataaaaatcatgactagtactaaattttcagctagtcaaccaaaaccaggaagtgacgagaaaaacagattttattagggtggaattttaccgttcaggtttattttattcttcaatttaatttgttgagaaattttacggtttttgagagataccaagaggtaccaaaacttttaaactacatttttgtatgttttagtagtggatgtaccgagagctagctagatactcctaaatttcacaattgaaaatgttcctctttaaaaccgtaaaatcactgtaatttgtttcatttcagcaccatgcacctaccctgtcgacaactttgaccgcttatggtcggtcgatcggttgaggcggctaggaatatcgaggtacttcacgagtgagattgaagaatacttggagtacgcctacaggtaattaatttacaaacagctcgttcagaaacgaagtgttgcatgtatgcacattaatttttaggccttgtttagttcctattttttttcccaaaaacatcacatcgaatctttgaatatatgtatgaagcattaaatatagataaagtgaaaaactaactgcacagtttggaaatcgcgagacgaatcttttgtgcctaattagtctatgattagccataagtgctacatgcaacccacatacgctaataatggattaattaggcttaataaattcgtctcgtggtgttttcaggtgagttatgaaattagttttttcattcgtgtctgaaaactccttccgatatccaatcaaatctccgatgtgacacctaaaaattatcttttcacgaactaaaccagaccttaccgggtttgagacgaagtgtgactaactacatatacgcgtgcacatttgaaactaaaaggcacctgagtccagatggcatgagctacggcgggctctgtccggtcaaggacatcgacgacacggccatggctttccgtctcctccgtctgcatggctacaatgtctcatcatgtaaaaaaacaaaaactcacattttcttccaaaagccaatgcatgctgctttgatgagtacttaattactctgtggatgtctgtgtttttctcaatatttgtagcggtgttcaatcacttcgagaaggacggggagtacttctgcttcgcggggcagtcgagccagtcgctgacggcgatgtacaactcctaccgcgcctcgcagatcgtcttccccggcgacgacgacggcctggagcagctcagggcctactgccgcgccttcctcgaggagcggcgagccaccggcaacctcatggacaagtgggtcatcgccaatggcttgcccagcgaggtacgtactgttgcaaaattgataaatatatggttaattgtatttaatttgttactactaaatattagtaatgcatagggaaatttggcacagcatatttgttccatcctactgaaatttgacaattctaccaaatctaccgaaaatttggtattgctaaatttttttgaacagaaatattgtcaaattttggtgaacatgcccatatatagcaatctattttcgtagtagtaatcacaaagctcgatctagtacagttaagttgacaataatctattattattacttcgattgctgaaatgaaaatgggggcatatataggtcgagtacgcgctggatttcccatggaaggcaagcttgccgcgagtcgagacgagggtgtatctggagcagtacggcgctagcgaggacgcgtggatcggcaagggactctacaggtgacgagctcttcgatctaattaacctaggactacacgcaaaattaaaaaaaaaattagtacctgaaggctaaagccgcatcacgtacgtttttgtcatctttgttgtgtttttcttcgcatactttcaggatgaccctagtcaacaacgacctgtaccttgaggcggcaaaggctgacttcaccaacttccagaggctctcccggctcgagtggctcagcctgaaaaggtcaccacacgttcctcttaactatcaatatcacaacaacttaatttattccctaatcaactaacagtctgatacgacgaacctacgatgtttttatgtataacgcggttgacaaaatagtagtagtaattaattaatatattatgtgtcacttcacaaacatataaacttacattcaacatatacaattagtaacaaaattgacaaattagacaacgaattgtgtgctctactaaagtcaatttcatctttcttttattttcctatttatgtaatttgaaattactacatctgtcttaaaatgttgtaatctataatgggatttgactcacaattttactacatatataggatgagatttgatccatccaaatctcatcctagattgtaacattttgagatggaggaagtacatctatgtgcatgtatgtgcagtgataaatattcgttttgctaaaacttttaaatttttattatatcttttttggatgacatgaaaaacaaggagatgttcactcgagagagggacgaatagactttccgtctgatatgatattactctactgtgtaactaaagatgtttcttactcacaagcgtgcgtatgcatcatgctgcgcaggtggtacatcaggaacaatctgcaagcgcacggcgtgaccgaacagagcgtgctgagagcctacttcttagccgcggcgaacatcttcgagcccaaccgggcggcggaacgcctgggatgggctcgcacggcgatcctcgccgaggccatcgcgtcacacctccgacagtacagtgccaacggcgccgccgacggcatgacagagaggctcatcagtggactcgccagccacgactgggactggaggtttactcttcggccgctcatatatacttttttaatttcttcaatggatttcttccttcaaaaagaaaagaacataattaattattcttataatcaaattacattgttggagcaagtttaataataataataatagccaactattagctgcaaaaattaaaacatcatttataaccaacctaatagtccacttataaaatatttagttatagatatatatattgcatcattaatatctaatccactcatctttcacacatagtttttatttgaacctgtgttgcagctagctataaattaattaatttgtagcttatttttcttctctcttcttttccctcctcaacataagaacaaatgtgaggtggtagcttgtacaacccgattatatcatcttattgtgctcgcctatacagtgattcatgtaagattttcgtttgcgtgtgtgcagggaatcaaaggattcagcagcgaggagcttactgtacgcacttgatgagctcatcgacctccatgcgttcggcaatgcttctgacagcctacgtgaagcggtaaaattaactttaaactgatgacatggtgtgttaattaatttaccctgaaaattttaacacagttcaatgtgttctgttaactgcagtggaagcagtggctcatgtcatggacaaacgagagccaaggatcaactggtggggataccgcattgctgctagttcgcacaatcgagatctgctcaggacggcacggttcagccgagcagagcctgaagaacagtgcagactacgccaggcttgagcagatcgcctcttccatgtgcagcaaacttgccaccaaaattcttgctcaggtacgtgcattgatcactcatcatcacgaattacaaaaattaattaaaatgctgcttgaggttttttttttaaaaaacatgaattatgatcaaacagaatggaggaagcatggacaacgttgagggtatagaccaggaagtggatgttgagatgaaagagctgatccagcgtgtctacgggagcagcagcaacgatgtcagcagcgtgacgaggcagacatttctcgacgtggtgaagagcttttgctacgtcgctcattgctcgcccgaaacaatcgatgggcacatctccaaggttttgttcgaggatgtcaattaggaaaatggttgactactagaaaggcaataaaaacaagagttgtgtctaccagcatggctcgtaaagtgatgactgcgaaaattttctcaaagtgagatgaatttagtcgatatttgtttcacttgatggtacaccagatacacatgttgttataagttgtctgatagctagtatactatatatatatatatatatatatatatatatatatatatatatatatatatatatatatatgaatatgttctgaagtgagacgtcagctatatgaattgtcttatttcagaacaaaactttgcacatcgatatgccattaaaaataaatatgtaaatatgtgaacctttttttctttgtgctctttcttttgtttcccatctcaatgactacgagttctagatcttctttgcaaatagaagaactttgcaaacatactaccgtgtcgctctcgtaggcatccttcatagctcaagtggtaactactttccatgaagagagggccatggaatacactattgtagtagctgaaatggcggattcccttgctatattataatacctcgctccttatacgggggcagccctggctgagtattttatttaccgtgaacgacgtactttaataatttatgacgatctctccaaacaggcacaagcttatcgccaaatgtcccttatattaggaagaccgcccccccccccccccccccccgtgaagcttacctaggggatgttttttatttgcactcacgccttttagaaagagccgctaaattaaattctcttttagggaaatgaagtatgactgctttaccaacagttacgactcaatctggagatgtttccgtctatattcctactaatgtaatctccattacagatggacaaatattcttatccgcagatctattcaatgccggaattcggcctgctattaatatgggtatttccgtttctagagtaggatccgcggctcaaattaaagccatgaaacaagtagctggctaatcaaaattaaaattagatcaatttgcagagttacaagcctttgcacaattcacctctactctcgatagcccaacctctcctagccccacaccgctggctaccttgtcgcagggggcggcaccaccagtagcgccttcttccaccctttatctcccttagccatctccttcctctttccttcctaaccttctatttcttttttttttccagatccagaagattcatccttgtcccagatccggtcagggtgcttggagcctaaggtctggctggtggtgagtaggacgaccggttcgcgtgctgaggtggtggtcgcgttggggcttggcgcatgcgtccatgggtgctgaaaggctggagtctgccatgagtggcgaggtcaatgatggccatggcacgggggctagtccttcgtccccttcctctatcttgagttcttgaccccttaatatgagtacctctagaaaaagcatatacacacaacttatctctataagcatgttcaacatattttaagactaagaaagtcaccactaacacttggactagaagaacaatttactgtaaatgcgaccatccgtgttaagtctggacttaaatccaggtgagctggttccactaaaaaaacctaatcagttcggccacgttcatttcgccacaaagaagaggtgcagttttactaattaaactgcgtagggtagaaattcttctttttttcctccataaaattttcaacaagaccaattaaattgcttctaatagttcaaaggtaaattttaatggaatgagggaatacactgccactaatacctcctaggattgcttttttttttcttctcagtttttaagttgttttttactaagtagaaattgacgcatgattgttatttcccaaaaaactcctcgtatttagacagaatatcccatagatcctttgaaccaactaatgtcccgttgtgttttatctggaaaaccccttgtattttaaacatacaatacaaagaagagaaaatttggcttctagcagtggcgctgtaaacatgaaaaacataagggtgtttccgaaaaacaaacatatttatctccaaaccctatccccggccatctcccacctcctccaccccgcgccccactcaagctctgcgctcaacaccgacgccgacacggggctgcctccgacattgtccacaaattttatggttttataacattgttcacaaaatttacatatctctaatatggttttataacctataagtgagatatgtaaattttatgaataatattagtatcactttgtcggataaagaaatgaccaaaataaaagttatagatattaatgagttatacaactttgttgttgatgtccttttcagttgaaattatttattatttgaaaatattgtttgaagttatcataatttgaaattcaaattcaaattattgaaacagagtcatatagcaaaatgatcaaaataaaagttgtagatcttgataagttatacaacttcgttgttgacagttttttcatttaaaatcatttactacctgaaaaattaattgaatttagaggagggaggcaaaatggacttctcggcgagggatgagcaaaagggttggaccgacggcccgaagagggaggaggggaaggggaagccggcccaaggagggagagagaggctgtgggctgagggagggagagagtaacacttaagccgaaaaaggtgcaaggacagaaagagcgattttaatttgttttccatttattttaataggttaaataaactttgtggtattaaaattagttattgagctctgaaaagtcatgaaaaattttagagaataatttagatcatgtagaatattacaaaaatatttatggccatgattttcaaaggaaaattttagtttcctcgttaattcacttgattaaattgctttaacttttattatatttttttagaaatgcattatataaatctgtgacgcttgctttttgccccttatgacaaagtaatattcgtcataatgtcccattgaaatactttatgacgatttctagttggtattaacgacgaacaccttttttcgtcactaagccaccgcatctcatattaattgtcataaaatggaatgcactaatgatgaatagctccgatgtcacgaggaattcatcacagaaggtcatatttcttgtagtgaccctccccccattgtcgtcgtgcgccctcctactactacaaaaatggctataggtgccgattgggaaaccccatggatgccggtttcccaaccggcacctattagtcggtacctttgaggactttattctaacaagatcccctatctggcggaggggagggcgccaccgccgctgcagttgccgaggtccgccacctcccctccggccggatctggcggagggcagggtggcaccaccgcctggagccactgccgcctccaccggactgcagcccggccgctaccacctccgccgctgaggcaagcgagagagagagagaagataaggatgggaggcgtgcgttatatggataaggccggtgctcgattggcttgccggctcggctcggtttggcttggtatatataggtgtccgtttttttaaaaaccgacacctgtagtataggtgtccgacacctataaattaattatttatgttcatccacgtgtttcatgtacatatatgattaatctttcagcggcactataattttggctgattagaactaatcagatgagacggatttgcttatttaaaggggtcgcataaactcttaggtagatagccacgaatagtctaatccccaaaccgaagaaccataacactataaaaccatcaaatcccatgggaatctatcaaattagacgagtcctaacggttttataacccgtcaaaatagacacgattttatggatttgggattccaatggtgttaacatgatttggatttagtattttccgttgcaatgcatgaggcactttttctagtgttcaataaaatcggcacatctaataccgtttggttaaataaaaagcaacacacgtgtacaaaccaaacaagcccaatgtttattgctttctccaaagatcacgagaagatatgcttctcgagtctcgaatctttgttaagctcttgtaagtcctttcttgcagggagaaaatagtggcatcatcagcgaacatccgtgtcattgttccgtccgtggctgcgcgtggctgactagcctctgtaacattaatcgacgggctatcttgcgtgtggaaactgcttgcagtgacgagagtcgtctgacgagtaggcttcagctgccaggacgggttttgtacattgtggtatgatagagagttgtaaattacggccatgtggtgaaaataacaacctattattacatgctattggttaaacgacaacgaattacaatttttccaaactatgattagaaacaaggaaactatttagaatactagcctaaagatagagataacacatattttaaaacttatatctctagttaacgaggaaccgcatattgttgtttatccagcgacttacaaagtgtccttatctttctcaaatcagataatggaatatcatgagaacaatgtcttattattgtgtggagcgaatttcacacttcatcatgcagttgacattgaaccaaagcgaaagatagcatcggattgtaactgcactgtaaatcacttactcaaccagatcttgctatcgccataacaattgaaaccgatccggcaatgatgtcatcgctattctggatatccagaactaggttttcacctgaaagtcaacctcgaggcacaaatagatcgcacatattggtcggacgctaccgtgggccctagaaatggttgtctcgtagcaggatccatgcgatcattggagagagtttgtggtggtgggttggaaggtcgagggaggcactcactggggccatcattgccactgcaaggcgatgcgcatatatagagggtggatgtgagaggcgtagtcacctgtgatgctgcactttggcgttgtctggaacgtcgtcgcccatgggccgctgcctccatgctagcgcaaagatctgattgcgtccgctgccgcctccacaaacaggacaatgggagagtgtcgtcgcccataccaccttttttgctccaacaggcctcgatagcggcacctcctgctgtctagccacagctcattgcactgtcgcttcgactgcctgatgtctcggacctgttggacgatcaccatgggagtgaattcatcaccgcctctccatttccccaccacgcgcctgactaactgattgttcgagcctagcatggtatttggatggaatggctgaacgaacattgtgttgggcttgctagttgtgtatggggtgggtaagttatgtctgccagggtacaatagtccttttgcattttgtaaatagttttttccttttatgttatctcacaaatttgagtccaccttactgccatccagaacaaggaatactaaagcctagtttgaaaaatgtaaggacaaaaatgcaacctaaagaaaacaggaaaaaaatcataagtgcaacataaataggagtaagaacacaattgtcttttttctttacgttggttagttttttttaactaactaactttattatataaaaagatggaggaattaaggtgttagaatttccttgaacacgaggcatatactagcacccaaatgtcttgttggaaaattatactccctccgtttcaaaatgtttgacaccgttgactttttagcatatgtttgaccgttcgtcttattcaaaaaaatttgtgaaatatgtaaaactatatgtgtaaatgaaagtatatttaacaatgaatcaaatgatgtgaaaagaatagataattacttaagttttttgaataagacgaatggtcaaagacgtactaaaaagtcaacggtgtcaaacattttgaaacggagggagtatttggtatggctgaatattgtaccttttgatttatttgaagttgcatgttcatcttcgtaagaaaaaagcaattaatctttttcccctgaatcactggaaatgcatttcctcttatgtgtgtgtgtgtatgttttatccacttcacactgttttgcaggactgaaaagagtagttgtatacattacaagcaacttatttcatacttacgagtaaaacgttgaacgtttgaatacactacatgctttctagaccaagaattattgagtgatagacattacaagtaacttatttcgacctagtagttataatttgcaggaaagctacacgagcaataaacactttcaggcagcttaacacagtacaaatttcaggttttgtttggtcacagcgttcccaaaccagatggaagaagtgtcacttgcaggggatcaagaatcaccgcatttgctgatgccatcatcccatcggccgtgaaatacccgtccttttccatgtagacgaagtgcaaaaccttgctcatgaaccagaagagcttcctgcacggtggaggaacaacccccccatctctagtcaccagccttaggaggtcacacctactaccctggagaaccctcctcatctctctcttggcctcctccatcgatgcctccggtgagccgcggccgccgccgctgtgggaaagagcatgcaacatgacgctattgaccttccccattttgatttccttctcgtatgtctgcatgtcattgagaaggcggccgatagtgttcgcaaggttcattaggtggatgtactccttgctcctgaaaacctcttccgagagctctggtccgacgaacaatgccgctgaggtgatggtggggcctagagcaaaggagtccacggcagctgacatgtactcctccactgttgttggcacatacttgtccatcctccattctgcctcggtcaacatgcccctcactgtgaaccaccactgcaaatagattatatattatatcgtggaaaagtaaaacctagaagccttaaaagtggaaactcacacacatgaagagagagatttaccgattcggcgatatgatccacgacattgcgtttctgcagcggcacggccttttccgcaatctgcttgctcgtgttgtaaatagcatagaatagaatctctacacactcggaggagaagccaatctcaccgtgcccgtcccacctgtacaacacgatatgatcacaacgggactaatagatattagttgtacaaaagacatagtgtacaggtgtgttgtacttctctattaatttgaccaagttctccatttcttcttttgatccatcaccgtcaaagaagtcatcgactgtggtcgtcaagatgcagttctgggtccatgcaatgcgggcttcggataattcagaagggaacatggttgcagcagcactgaaataggtgatcgatggcattaatcttgcaaatttcagctcatccaatctggtctgtgccacccaactgtcatatgctcaatattagtcaatggtatcaaaaacatcttatcacaatggatgaatcggggataggtatatcatatatagatagattttgcacctattaaggtcttggagttcttgttggtagacagattgagaggaatggaattcgtcaacagccaaagctagaatttcgtcatgtgtaatagcgccactgatccaagttataataggttcacaatttagacaactataacagtaaagaaataaattgtacggctgtgatgtgtaacaatgatatctaccggtatcctgatttcagcagcttgaagccctcaatttttagttgttccttggtcttgaattgttctatgttcctcttctgctctagcctttccaaggtggcatagactgggaatttcaaggcatactccacctgcgaaagtatgataatggcattatgagaaataattgccttctcttttgcatggctgagatgttttttaattattcaagaacattagttcgctaagaggttatttatttagtacttgcctctagcatttctgatttgtgtgtcattttggaagatattttttcctgtagtactcttgctgaccaagaaccaatatcttgtagaatcaaatcatcttccaagcaacgaatttgtgaacttctgtacaactccagcaaagccttagtatcatttagatatccatgaattgagtcatcaaagctggattgttccacaaattgagccattccatctgctcaatagttccgaaatgattattaacatttccaaatgagagtttgtactgcaaaacggaaaaaaaactaggatattcaaatttaagtgtcctaaagctccatgcaatacctgaactgatgtcataaccatgcatacgtagtaggcgaaatgccatcgcacatgttcccatgtccaacattagctcctcctcgttgtgtatccataacctgcgaacagaatacaatagaaataaagtagtaggtacaaaggcacatcaaattgccatcattagcccatcctataactttttaattaggtcattttttatgagttgctgttacctgtatatcatgtccaatatatcacttatttcacaagaaaaattattagagatacccatcttttcaagagtatccaccatgccaagctgtgagtaagcattttgcggatacatcactgggactggaaaacactcatttccaattagtatatttgatatctcatatatctagttgacattcttggtcacttgcttgggcaggggggtgggggggggggagcacacctgggccatcgagcttgcttacaagtgaatccaagtaacagagggcactatcgttgtggccatggattactgtagcagcagctgcagaaggtgagttgaaaatcgatctgttcttcctttgatatgccattacctgatcccaatcttgtaggctgcccaacccttcagacacatatgccatgaaggctcttcttgatgaagctgtaccataagcatccctgaccatggagatcgtcaaatgataacattgaaaattctaaataaaatataaggactttttaaggagctccaagcatatttgaacagttcattggtgtttgatccaatgggtgatataatctattaccttgttataggtaaaacctcatagtaaggaaagaaaacatcttattgcaaatgccattaacaacaaacctaacaccttaataagggaagtataataagtaaatatactccaaacctaaccctttaataagggaagtatgataagtaaatatactccattccaaaatataagtacttttggaagttcgaagtttctcccggaatacaagggcttagaacatctcttgcaaattctcaataagaatcttcagtaccaagtcattattttgtgttttgggtgctccaactccaacatcccaaatggatgaaccaatcccaccccgtcctcccaccaccgcccccacagtaccaaaagaatactgttccatgtgatttttttaatatgtggctacttctaagggacaaattgaacacaagacaaaagttggacagaaagcattatgcccaggaggatgtagatctatcttgtgctttgtgcgtggggccaagagaaaccttaatgcatttgtttttcatgtttctttagcaagagctactaggatcatcttggaattaggtggaatactaatttgggaatctgtcaaatgctagtagcaaggctatagtttagaagaaagggttttcttgagaacatatcttttgcttgttggcctatttggaaacaaacaaatcgaaaggtttacgacaacgtcttgcctgattaagagttggtttgatgtttttaggaatgagatttttctacatgtttgtacgttaaatgatattctaacctctattgttcttaactggttacaagttttgtaattcttggctagtagtattttactaaaaaaatattatttggagaaagacataaaataacgctagttccatgcgatttttttttaaaaacaaaatatagttaacatactgagatgcaacattttttgttgtgttataggcctaatttacgtatatcctagttaggaattgtagaaaatgaaagatgtgtgaaagtaggggtggcaacggggcaaggcggggggtgagttggacagaaacgtccccgcccccgctttcctacgggtttccttggcccgggccccagaagaatgaacggggcgaaatcaatccctactctcggcccctctagggcctcgcaacctgacaggcccccatatggaatcaaatcacccttcaaacaacacaacacaatttacaataatagcacttcaaagtggagataaacaacacagatttttaaattaggggaaaacccagatctgattacaacagaatctagaaaacccaatctcacactaaaatcaatatagcagcaaaacattttctgtagcatcatactagaagtgccacatcaagagccttgagtccttgcaaaggtgactaggggctagacggtggctggaggtgtggtgtcaaggaaactcggcaacaatgtggccatgtgccgaagtgaagagtcagtggccgacaagaaagcacgacagcgtggcaacacggtgaagagtcgacgaccgacgagaaggcacagagacgcagagaagaggaggtgaggagccgcggtgaagagtcaaagctggtgtggagtggatccggcacagaggagcagccgcctccggccttttgctgtgactgcattggggcaatcgcgcgtcgtgatgggcggcctggggctggcagcagggtgaggaagagagtgaggggagaggatctagcgtcgaggagcagctgtcgccttgtggtggattgcttggggctggtggctgggagggagagtgtgaggggattttagcttatatatggagaagttggaatggatcaactgggcttacacacttcaaatgggctgttttagaggagtagcgcacacccgggaccctcgtcgggtcacctgatggttgctttcaatcaccgccccgcacccgaaaatatgtagggccccggtcctgctcaccagcgggtgagaattctcacctgtggcaggtcctcggttctaacggagaaatttccacaccctaagtgaaaggtatcaccgggggtggactaatggcatatatacatatatatatatatatatatatatatatatatatatatatatatatatatatatatatatatgtatgtatgtatgtatgtatgtatgtatgtatgtatgtatgtatgtatgtatgtatgtccaaacataacaaagttttaattttaaaaattgattaggagggaaggattaatagttgtcctatcgtctgtaaataagtacgtttgttttcctgtaagtacgtacatacattttatttattttcttaataggtgtgctgttggtacctacgcactgtttttcctcgccggcatttaggagggacaaatttgttagatagatctaggccttatttgggagagtttaaaattctgagaagccgttggtgagaatctggagaagttgacaaatccaacttctagcttcttaattcattttatggattgtaactacagctgtttagaatctaggttaaaatctagactttgggggggaacttatggtaccaagagattctaggaaaagttgcagctgccagaagctcacttaaacaaacacctaatatgatggtaaaaagtaatgggcacatcaataatttaataatgtaaatgtaaaccaacagtccattgttttgtttctccttaaattttttaagaatttttcgtaatttattagagtgccacatgacggtttagtagcatttgttgaagtgcaatgtaaggattaagagcgtttctagaaagtttaataaaattttagtatataatagatagatgactattagtttatagggagaatacaacaaaaagcacttgcgagctacttttctgtttcatattataagtcgcttttgactttattttgttatcgagtttatgaaaaaaattagcataatctaaaacacctaattagtttcattacaactaacttttaatatattttgataatatgtttgttttgtgaaaaaaatgttgctatatttttctatacacttggttaaaacttaaaagaaatttggctagaaaaaaagtcaaaataacttataatatgaatcagagggagtattttaaatgcatgagaattttgcctcatttgtattaaggatagaagattgatctatatgcaccagactctagtgtaccaaattagttcataagctaatgagaaagggttggaaagtttcttctacataaacaagccctacatgtctggctgtgtcaccaccaatattagttgtcacgtaaatacaaagctaaaagtaacaaataaatacaaatattcacacttggattttgaaatcgactaacctttccaattcaatcttccgcatgtgaaaaatcccatcaatatctgtttgcataacagggaattccaaacccgttccagtggcaaggttaagcaagccagaaaaggtaatgttaaaacccacaggagcaatagtttgctcatccatggcaacccagaaattttttccaataaaattcagtcctgccaaaaccatttttcgtagctatataagaatgtttcaccctacattataaatatctagacaatatattaaaaacaacaacaacataaatgcaattattgatttgtacctctgctgatgtgatctcgtccagtattccatcttttcagtgcaacaacacatgccaatgtacacaaaagaatgtctttgttgacaaccgaacctggcaggtttgtgccccaagatccatcatcatgttggttttgcagtatccactcgatacattgcgggaagcgtggagtttgatgagagccctgcactggcaccatggctacccatgccgtgtcgtatgaagatggtgataattgaacttcccgaagttgcttccttatcttatcctgcagttggttcttctgctgcatatcccatcagaataataaactcaaccatcgatatgtttcacaattcaatgcacgaggtttagttacaatactcagctgctgttcgatctagcctaatctgttgatgatcacaactaatcgagtctggttttttagaagctttaatgcgatgaagtcattggtggcatttttccttcttctttttttgccaccactgagcttctttggtcatggatgggtacatagagttctgaagtgagattgttttgctgttttctgggtgaaaacattgtagatctagtttagcttgatcaacaatatcgatgtacgtttattgatctaatcccttatgaaaggtgttgtcttgaaattgttgtggtgaaaacctaactttttgataggacaatatggtaaacatatatatatgatattttctttaggaaggtactatcgcagtctcttggagagtgcctcgtttgcatagatggccttcatgtattctcttttcatctttcagattgcattttcatattttgtcatgttgttgtggtttttctactgattttggcagtgcgcatctctggctagtcactagttagtacggaggtcgatagtttcttttaatgaattactccattatgtattaaaaaatggaccattaattactccattatatattaaaaactgaaccatgtatatatttgtcctaccatgccttgttggcttcccgcattcctccctaatcccaggctcttctcaacacctgcagctcctggggaaagcgaagaatatgcgtgagatacctctttgcacttgtaaggattgtgatagacaataaaatttatctgtctagtaacaacctcaacaactgtactctcaaatactcccatcagtttcatattataagtcatttgacttttttcttagttagatttctttgagtttgtccaaatttatagaaaaatataatagtattttcaacacaaaacaaacatattatcataatgtattcaatgttagaacataatattttagacgttgctaatttttttataaacttgatcaaacttaacaaagtttgattagaaaaaaaaatcaagcgacttataatatgaaatagagagggagtagcaaagaggtatatatatatgtgtgtactcaattcaaatgattatgattttttttaaatggttaggtattaatattaactactttactgactagttcaaaacaagttttaactgaatttaaacatgtttttattagaattcgattctaggtatatagcatccaaacatataattagttaggtatgtaatattggattgtgaaataaagttaaatttgagttgttttgttgataggtataggtatgaatcgaatacttataactaggtatatactcacaatttgaaatttttgaaaaatttgagcggatttgtgtatttcataccatggtgtcccatatgagtgtcctatatatatgtgtatgtatacacatatacatatgcatacatacatatatatacaataaatcatatgagatattttgtagcgcttgggaggtacctcatacctcttatgctcacacgaagaggaggtgctctgttgaactgctctatcatcccacggggtgaagctctgaggaattgtcctaagcatgctgaactcataggaagtatcatccacaactaccctataacgatactacacaatatgattctatgttacatgcaacatgggtttatgctgaaaaagtaataataatataagcgaagtcatctagatctagtttatgattcagctatctatatcactccctttcatcgtaggtccagttcaccacctcaactattacaaaaagtacaataattaacctcttcaattatgaaagaaaaaaaatacaccactcatatatttaatccggactcttaaatccctcgtaccctattttaggtggtttagggctaagctatcttgatacataaccaaatcttgcaaagtaaactttatgcagtctctcgtttcttacctgtgccatttctaagcctgtgggatagacggtgggttgttctactaatatgaaatattaactgtgtacttgtgttatactccatccgtcccatagtatagcaacttagggtgggagggagtactatcttccaagtcaagttaaacgatttgattattgctagctagcattcagcacgtgcgtacgtacagtacgcccttgaggacttgggtttgagaaattatgcattctgaatttatgactggctgcactgccactcacatgtacaccacgagaagaagaaaaatataaaaaaagaactaggaagagagagagaaaaaaagtttcatgcaaatcgggagaacgtgtcagatattaattgaaatatgcagaagtttgaatccgtttgttttttctacggaaatatgtatcagttgtttgatgtcatattgtttttgtgcaatgagagatctgtgcaaacaaatagaataaagcataaggaacaagtaatatactctattccacaaaagttatgtacgtacgtattactttcgtcaccaaaattaagtagaagttaactcatattgtatctaacaaaaatcaagaagtatatacacgcatgcaacaatgagtattaatatgactactcggattctgatcaaacatttaattttacctctctatttaaattttagatgaataaagactaccaatagaaacaacttatttagaaaaaaaaaataaaatatgaaatagtttactcttgtggatggagagagtaagccttaacagcacaggttttgacactacgtcaaacgaggttattttctgtatcagaacacaaacggtggtgtacgaagcaaagtgtagagcactgaaaggacacggatgtttaaaaggggcagtctgtttagattcatcggagaaagaaacccaccttacagaaacgagagaggcaggacgcaggagaagcaaaacctggcagaacagggtaggctagctaggccgcagctcgatctctgaacgagagagaccaagggggcaggaggaactagctagcagcttatcgttgatcagctatcggccgtgcctgcatgaaagagggcaacacgcatggaattagctagtctgttcaccttgcttatatatatattgctccccggtgacatcatcagtacagggaagcaaccactatttgtattatggcatcccatcatgattaggtaacacgtacgggaccctacttttgacaagttgttaatctgctgagatggtgcttttgctatcatataacaaaacaaagactacaagtccaaaatcgacgcaaaaataccagtaaattacactggcagtacataagtcctaaaattttgaaattacacccaaaattttgttaaatgtatcattgtacgtatatccaaaagtttatacaacccttcaactgctgatgtcccccacgactcttcagagttccagtaaatcaggcatatatgcttacgatttctattgtggttttgccctgagccctttgatttctagaaagattaatttgcgcaaataacagttccccatctcattgtgctcaaaaattacatgaaagttccttttataaaaacatgggtcactcaaagttccagttgtgtatataaacgtgcgtacagggtaggcggaaaatatatccgttcgatcggtcttgtatattacactctccatcctaaaatgtaagcatttttaagtatagtatcaagtcaaacttgtttaactttgattattaatagaaaaaaataaaaaagatcaatcgtataaaattgatgttactatatttatcattaaacaaagggataagtccattttacaccccttaactcttcgctttgtgcaacatacaccctcgaactttaaaaccgggtatttaacacccctaaactttcaataccgtttattttaaccccccctccctcaagcggtttttggctagttttcgcctacgtggcgctgatgtggcagtccagtcagcaaaaataaaaataaaaataaaaatagggccacatgtcagaggcaagctacctattcttcttcctcccttctctgccatttctctccttcctctttcttgctctatccctcttcctcccagaccaggagggcaacgatggtggtatccctgagctcaagggctagtttcagcgagggagctagctcctccttgaccccaaaagttcccatgcatcatgtggcttcaacatcacctctttgtcaaccgctgatgccttgtgctcttctcctccccgagagctactgccactgcctgacaagtgattgaaggggagagaacaaaagagaagtggtgggagtgaggagctctgcatcgaccacctaggagagatgagactaactggatccccttcgctaccgcccagagccccagatctgaccgatttttttttttttgacagggatctgaccgaatcttgagtgaagctcgacacatccaccacctaggagagatgcggagctcggcgctgagccgccgacaccaccatcgactgccttgctcctccttctcagactcctatcttcgtaagcacacccttctccgagcagccggtggccaccaccatgcccctcccttggcgatgtcggagaagatggggtccctagggcggcctcgagctcacgatgagctccaccgtcgtgccatcccctctcttgcctcttcctcctctctccaattgctctctcatcgccagtggctgcctgtaggcgcgattccgtcggcggcggctgggagagatggaggaggaagataaagccaagctggcctacgggtcccacattttttttctagctgaatttccacgtaagtgccatgtgtgcaaaaaccaccatggtttctgataggggtgtaagttagacggtttgcagagttaaggggtgttagatacccggttttagagtttgaggtgagttttaaacaaaggcaatagttgaggggcgtaaaatggacttatcccttaaacaaactatcataatacacaactctttttatttaaaccatattatatttattaatattgttggttaaaatagcatctcgaaaactgtgttaaagtttaaaaatagttatattttaagacggagagagtagcattttcatcatgtccttgtgttcgtaccttatctatttcgttcagatttgacctgccgcatgcaggcgcggtcaaacatgcacacaaagtacagttgattacttgctgtcatataaacgaaaaggatttacatgtgatctgtgtatcagtgtagaatttttttcatttttaaatttttttcttttaatatttatagaaataatccatgggcgcaaaaaattacaaaaatagaccctgccgccctccactagggcagcaagctgacgtggcaaacggggagggacgggcggtgacggcagacggaagagggagggttttttttttgcacgaaaaggcctccatgcaaaaaagccagcccgggcttagtactttttggctggtatagggcggcaagggacccagatgcaaaaagtacgagccaaatgctgcgaaaattgcatgagggcggcaaggggctaaatgcaattttcgcagacggccgcagacggcgccgtcgagccgccgtctgccacgtcagcttgccgcccaccactagggcggcagggtctatttttgtaattttttgcgccgatagattatttctgtaaatattaaaagaaaaaaaattaaaaatgaaaaaaaatctatcagtgtatggatgtaacttgaacggaacctgtacatccaacgcggtaggagtacgtttccgtggctgacggagcagacgatcgagggcggcaaccaggcgcaggtggcggtagaggaaggaggacgatgctcatgagtctaagtccatacgctattactccctccgtatttctaatgtataacgccgttgactttttaataaatatttaatctttcatcttatttaaaaaaatttatgtaattataatttattttattgtgacttgatttatcatcaaatattctttaagcatgacataagtatatttatatttgcataaaattttttaataagacgagtggtcagatgttggttaaaaagtcaacagtgtcatactttttaaaatatggagggagtacgatggagacttttttttccggtcctgcaggggcaggtaccaaattaatcccgatcgttcattggtgtagatcagatggctcagaattggtagtactagacagtacttcctccgttccataatataagtcacaactactttttttaaatgatccataatataaggcatgcatgtatgcatataattaattatgacctcttctccattaaattatgacttttttaaatcctccaccatcaagatctctaattctattggatgcatgtattatatttattaggataattcaaactaggagatgacggagggtgggttttttgcattaaaacccttgccgccctctggggcggcaaggggtccgaatgcaaaagagccgcagggggccggccattttgcaggcggccccttgccgccctctggccgggcggcaggcctcgctgcctataaaaggcctaccgcccagcccccagccctcattcctcacctctcaaatccagtaaaaaaaaaagaagagaggggaggagaagagaagaaggggcgaagccctgcggattcagacaccgatttcaggtaatattcgtagatcctatatgtgactattgagttaaatagtgtgtatttttaaaaaatttgtttgaataaatgcattatatttttatggttttagttgtactaatttagaagtacgtattgtagatatcggtaacaacgtagatctgttagtttggaatcaatactttaccgttgcattggcttacacaagaagatattacgttgtagatgtttattgcatgaaagagtaatatgatctagttaattcgttgacagatatgtcgaacaaaccaatattccaagtttaccatggaccaggaaacgtccgttacgggccaactggggtagatctgtcagattttattgtaccagaaaggggaattgagagaccggctgagagaagtgtaccttctataaaaggatggttaatgaagggcttgagagttgatccacagacaagtgacataacaatcaatgttatagtaagtcgggcaactgagagtttttattgggaactaatgccagttcaaaactctcaagtgtggagatggtatgtggaaaatgcaatgcaacgtgggtggcctctagctttggttccgtttgtgcaaccgaaggatccaggtgtgcagataaacatggatgatggcgagggaccaagcgttgaaataaatgagacttctgtggaggaggtcaacgcaggagtggacggcggcgtagtagctccagtgggcattcaaccaggtggagtggccgacgagggggagactgtcgcagccattgtggatgaaatggagagagaggattctgacaacgagcgtgtggaggaaggtgattcgtcagatgaggagacggatattaatccagcagaatgggctagtcaggatttttctgggctgatcgtctctgaagaggatagtgtgagatgggagtacaaagaaaatgaggttattcagggagcgatttatagtagaacagaagatatgaaggaggcggtaaaacattttgcagtgtcacttcatagagagttttgggttgccaagtccaaccggtcgcaatatgaagttcggtgtgttaaggaaaaagatggttgtccctggagagtgcacgcgtataaggggaaatggaaggattattggacagtgtcagtcgttaccaagcatacatgttttctacctggtgttcagaaataccacaggaacattacatgtgcatttgtcgcatctgagatgtatgcgcatgtcatcgataatctcacatacgaaccaaggtcaataatccgacacatcgaggagacatacaagtatactattagctatgccaaggcctggagggccaaacagaaaataatagagatgagatttggaacatacgaagcctcgtatgacaatttgccacgcctgcttggtgttatcgaggaaagaaaccctgggagctcttacgaagtgaagaaattcccatcaattgaacatcctggcaagagtgtgctgcaaagggcgttcttagctctacatgcatgcaagatggcattcgtaaactgtcgtccagttctctgcattgatgggacattcttgacaggaaagtatcggggccagatactgacagcaataggggtagatgggaacaatcaggtattgcccttggcatttgcttttgttgagagtgagaatactgacagctggtactggttcctaggccgactccccctccgcacggaggtaagtatttttaaggatttttctgtacatgcctcgcacatatatgtgagccgtttcacttgccgattgattcagggtttcgtgcaccgttcagcaccccaccttcctcggctaggccttctggtgtgcccccaacaggtacttaaaaaacaacattacttcgacaatcaatttacatgcattttatgtcttagcttacaaggtcccgttgtcgatgtgtaggtttcgcccagttcgctatgacgcaggccgcctacttctcccacgctgcagggtcagcgtctcagccagctgcgtcgacctcgcactcagcgcagttccagcagtacaccggggcttcgtcacaggcagccggcacgtcgagtcagggtccaccactggaccatgctgggacctcgtcggactgcttgctgtcttccaccttgctcttcgacatcactgacttcgacttcgcttcaggctcggcagaggacgtcatcggcccctcacagctgggaggcgcaccatcggtgcagacgcaggaccaggcgcaggccactcctccgccagacactcgtgctacccgtgctgtgccaccggatcgtttcacctactcccaggaccacgtgcgagcacaggcccggaggaccaagcgtggtcgcggcgcggggcagggccagtagagctgtcttctctttgtttattcgcttcactttccagtactgtatgcttgtgtaatgactactgaaagtgcatctaggcccctaatgattttgatgattgattacaatgcgattagagaggactaacatttttattcaagcaaatgtgaaggatgttaagtcctcaacatgttgtaatacaatgcatatcccgtgaatgcgacatcgcgatacaatgcggcaatgatcaaatggtagattgtatccttttcctcgcattgtgtcgtaggaaaaccgtactataaagggggatgatgcatagacatataaggagtgatgcgtgtgctcaaaatcatttttccttcgaagcatttctcttttggagtgttctggaaattttcggaagttccgaaaatagttttcggaagttccgaaaatacacagaaccgtttgagagctctctggaaattttcggaagttccgaaaatgtttttcggaagttccgaaaatacacagaagcgttctggaaattttcggaagtactttcggaagtattttcggaagttccgaaaatgggcgttgacttcgatttttctcagatctggaattttcggaagttccgaaaattgtttcggaagttccgaaaatcccttttattgctctccaactgggtcccttgccgcactttttacatctgggtcacttgccgccctctattggggcggcaagggacccagatgcaaaaagtacagccgcaacctcctggagggcagccaaaattgcaattagacccttgccgctctctgtatgggcggcaagggcctaatcggaattttcgccgacggcggcagacggcgcggtcgacccaccgtctgccacgtcagcttgccgccccaatggtgggcggcagggtctatttttgtaatttttctcgccgatagattatttctgtaaatatttaaaaaaaaatctaaaaacaaaaaaaattccctcccttctcacatccatccagctctcgcttccccacccgctagacacaggcccatcaaggcctgtcttctggcctttaatcttcccctcccgtcctcacacaatatccagcaagaataccaagtgacctactccctctgtattttaatacatgatgctgtcgattttttttatcaatatttaactattcattttatttataaaaatatgcaattatcatttattttatgtgactttatcatcaaatgttttttaaacataacataaatattttaatatttgtataaaacttttgaaaaagacgaatggtcaaacattggtcaaaaagtgacttcatacattaaaatgtggagggattacattttcccgtccattgaccttccataatatgtgttggtatttcttaacgacattactagaaatatagttcccagcaatggtgcagaaatacttctggtatattatggttacaaagttcatccgcaatcgcacggatataccattgtagcatttcatccgagaatattccaagggtatcgtatttattttatcccgtgggaagatcatgtagagagagcttgactaataatttatatactacttgtgataatcatattctaagcaggggttaagataatccaatggtagagtgacacaagcattaactactcattctcataatataccatctaagctaagtggaaagaaaagagaaagaaaatctattcctatatttctaatatacatagtatacatacattctagttaactaatatactagctaataccctctatccgatgccctcctggtacttcgagaagccactcctgactgccgagttccttacgacagcccgtcatgaccatacaaccagggctaaatacggaggaataccctccccagggaattaacttaggattatataccggcgcggaggaatacccgtactgagctgtcaccatcagcggcccacctctcatccgcaatatataaccccaaataatgatatcccgtaatctagacaccacgtctaaactaccagatactactctaatatcatcgtcatgacatagagtaattgcataagcaaacattatacccgcaccaaagcatctcccagataagctagccgtatattcagtataacatgaacataatgtaaagttggtactcatgtagcgcccgttccgtcgtggcgcctagcgggaaaatttaattctaaaaaccctatttgcgaaatctgtttctttgcttgttgtcagtccccgtgccattccagatctcatttccccgatccatcgtcgaaatcaaaaccctaatctcaatctgtcccgaatcaaatcctctcgaaaagtctattttgcctcccttgagttcgtgggccgatctcttctccccggcccatttctcctcagcccatctctcctctctcctccatccttgcccgcacgtgtgaggcacgtgcgccgcacaggcgctgagcaagagagagctcgctctctctctctttccttcccctctctctctctgctctcgctccctctcgatgccgcttcccgccaacgccgctcaaatcaccgcgccacccgttgcttcccacgcgcgcgcgccgtggtggccgaccgaccagtcgccgccgccgtcagagcctgccgcgcctgagcacgagtctgccgccttgtagccgcgcccttccaaaccgccccgccgtcatcgtcgttgtcatcgaccaggccccgccactccgcgtgctagcttccaagggatggaggcagagctcctcctcctcctgccgcgtcgccctctctccctccttcttttcccaaagaggcaaggggcaagccactttcttccttcctttttcccttttctcttccaccgttggcgtcatgccctccgtcgccgttttggacgcgagcgccgagcgccagctcgctccttgaccgccctaggtcagtttccaaaccgacattgcccttctattaaaccaaggcgccctcccttcctcttcctctcccttgttttcgccttctgcctccaccgcgccatcgtcgctccgccctgcttgcacctccgccgtttgtcgccaaagcaccgggagagccagtgcgtgcgaaggacgcgtgaaggggactccgggcgctcgtcttcttcctcttccccggcccgaggccggagagatcactcccgtgccgtcggcctctcgtcacagcgccccgtctcgtctcggtagaacacctccccgttctccctcctcactcttcctccttccgcttaggcttgagcagtagcttgtgtagcctccccgtagctagcctgcgccgcccctcgcagtaggcttgccgccgtcgccgctcgcagtaggcttgccgccgtcgccgccgcgctcggtagtagccacccatcatcagccttcctcggcgatgttccgtccaatccaatgctagaaacggattcccgaagtcgcgtagatgctctagctcgcctgaatcgatctcccgtcgcgccgtcgctgttaccctcttttcccgccgccggttgccgccgccgcaatccgctgccgtcgaactccctccagcgaatccgagccattggttcgtcccctctcaacccatgctacctcccggtgtgctcgctttcacctgtatcgccgtggttcgctctgccgttcgcagccgccgtccgccgtctgttccagccgacgccgtcttcaacctcccgccggtccgcgtggctgccacgtaggtgccacgtcggcgccagctcggccggaccgggtcaagccgatcccggtcagccgctccctccgtccccgctcgcgtgcgcgcggcccacggagagccgagaggctgcgcgtgggccacttgcacgccgcgtccaccgcaagccacaagcgtgcaccgcacccaccccaaccctagcgccgcgccgcatgcacttcgctcacggtgagccgagccgccgacaagcgggtcccacttgggacaacgcgaggtggacccggcccaccggttcccctccctctctccccgcgcgtgcctttgggccgccttctcgggccggccggcccatttagctcggccgagccgcccttttctctcgggccgcaccctagccgcctgagggaagtctatttcccctccctctttcttttcttttttcaaaagggtttaattaaatcctttttcctttagaccaaaaatccaataatcttagaaattcaatatcttttcaaccgtacatccgtttgactccgttcaacttccaaaattcctcaaatctcgagatctatctaatggcacgcttagaggtcaataatagggctttaatttcgccgtttgttgagtcgtctcattcgcgtgtagcttcggagcccaaagacccgcagtgcgaggatttcgaggatcaagctcaagatctcgaggaaggcaagtcacctttgatcatcttacacctataatttaaatctaagtacttcttttccacaaataatgcatggataggattaacacaagtaatttggccgcggcttgcgagatagcctaccggccccaatcctaattgctgcaattaccctccttgaattattgaacacttaaacctcccttgtcaactattgtacttcgatgtacgggccttcgggcacgcacgtcggagtcctcccctcaaatttaaaatgtccaacgatgggtaaaacttaggttttacgaaagacttggaaaaaaaccaacacctgggtcggtgcttgcgaactaaatgaatttccaaaaatcgcagaccgggggacgtgccgggagcatggtttcccgctcttgcacttaaggaccgattcctttggaatttcatccgaacatataacaagtacgaccacataggtggaatgggacacccctggctgagtaattagctaatcaggggagccttgatgccgggagacaagtggattcgccagggtggtatcggggaggacccctgggcttcctggcacagtatggtctaggacctaacctgttgttggtctgggacccctctcgtcggcatatggtaaacctgtgtcggctctcgaaatgccttgtcatgaaagcctcaaggtcaccagatgtggctgttctgcacgggctgggtgatccgggttagtaatgtcgtgtgggtaaagtgtgccccctctgcagaggttattaaactgttcgaacagtcgtgtccacggtcatgggcggatgtaaggtgattccttagcgtagttttgtttgaccaccgctttgtgaaattgctgttgtggaattgggttcgatgtttggaacatctgtggctgatgggatcagctagggccgggtggccgtttgaaagttgtggccgggtgccaatcttgaatctatcaaagactgatacattgcacatactccgaccggacgagatgcactgtctcatccgtgtcgtttgagaagcactcacttagttgtttaaaaaggagtctaactaaaatcaattgtaaaaacaacagcctttccttgaagccttcattaaacacataattcccatgacttgctgagtactcctgtactcacccttgctctatataaataatcctccccagttgctgaagaagatgagatggatcccgctgacgaggagttcttccaggagcaagtcggctatgatgagttttagggtttcgatctagttcccaagtcgcgcctatgatgtatggtccaagtcttggcttccgcttttctcttttgtaatgcagttgtgagctcggggtttgtccgcagcccaacatgactgcaatactactctataataaagagacctctgttgctgcgatattctgtcttcctgtgataccagcactgtttcctgggactggtatcggctaacaggttaatttggagcgtcacgggctgattccgttcggggctagttcggggcgtgacaactcatatactcggaaagtatttcaataccataaatgtatatagaaaaatattctaataaaagtacaaagcttacaaaagagaagagaagagctattagagccatacccgaactcttccgaaggcttccagactcctgatttatactctattcctattccaccaactagatactactaaactaaacttgagagaaatgagagcccctgagcccctgattcatatttaatacatcgtaaaatctaattcgagagccatctcgttttagcgttatcgcacgacgctgggagagtcgtcctattgcgcgcgtcatcgtggagtccatctgcgtgggcctcgcagtcacatgcgtggctttctggataaggatcgagattaaaccactccaaccgcacatcacacgtaattcttgcttcaaagagagtcagagagagagagaggatggccactggcttctgcgttggccggtggtgatggcaatgaggacggcgacgacgtatccaccaagcggagaagggcgacagtgagcacgggggtctccgtcgttgccgtcgtcaaggttgaggtaggaacgagtgggggtgatgatgatgacgagtgcgaggcggagcggtgaggcgcactgtgtaagcgatgtactcgcatctcagcatattgtaagagaggggtgaggcaaggtgaccccctctcgcctctgctctttgtactaggagctgagcttcttcaggttattgtcaatagagctcatgtcaatagagctcatgttatggttactatcaaagccttttccttcagatattgatccaaacttccccattgtccaatatactgatgacactcttctctatttgaaagccagtggtagagagctttttattttaaaggctttattgctttgcaaagtgatcttttacatatcatctttcatattttttgccattgattttctactatatggacctaccacagctgacttatgtgctgcataactgcacttccagtatattgtggtggtaagtggcaatcgattatgctcctcaaattattgcttgcccaaatggtgagtttccctgacgatccatgtttcctactggctacaagttaattggtccttacgcaaaaacttttgactttgcaaccttctgtctctaatataagagttctacaaagtttttcaagtgaagtcgatgtacttatggttccaaaatgtattgttcaattgccaggctatgtttctcgacctgcatcaccccaccccccccccaccccccccacgcaccaacaacccaaatacttaaaagaaactcggcagtttcttctgtatggtgaattgtgacaagtttgagtaataatgagatgcaatatcgcagtgataatgttctaaaattggatatcaaaatgtatctaatcgcatctgtaatggctgttggccaaccgacgactcaactcctctcacacgagcacacacacaagaatgaaaggcaaacacagtggattagagaattttggtgctgcacaccagcaaaccacaacactcaccagcacgctcctgttaatcaccacacaaaacacaagctaatacacacacattaagccatgttctggccgcactacccagccaaacactgcatggcttaaccactaatcacttccctacatgcaggccacatctcttgcatatagagcaccacactcacacgttcagttgctggtatccaatccgccgatgcatgcgtccatgcaaaacagattgtgacctcttcctgctcctgaacttgcgccatgactcaatcgaccaaacgcctggccacacacatatgcaaaactaattctaacacacacacacacgtacatacacatcatgccaccactcttggccactaccacgccgcacgatgagcatatatactactaactacagcttaacacaaccaaacactaaaacaacaagattaatttctaacaatgacaagacccagaaattttcactacgattttacatcttattttcctatgatattttggacagattgaatgcctagaaagtaggtcgttcaggtgccaagattccacccactttttcaagtgatttaatggtgtttatttcgttgctattctcttgacacatatcaagtctttgactcctaagttttaataaaataaaatctctgattcctgcttactcattgtgaaaaaattatttaatttctttgttttttggagtatttccgagcacatcaagacgcgcgccttaataacccctactcaatccgaatccaccctccagctatatatggccatttgggcggcacggcccagcacggtgctggcccatgtgctgaagcatcggcccaggcacggcccaacacgactcgggccgtgccgagccgacccgaagtcacgacagcccattgcgcttcttcataaaaaagtctaattttcatcccttatttctttgggccatgtctgaatgattgtattcagtctattttgctttggaaaaagtacaccgcaggtccttcggtggttttgaccccggttttggtctacgtggcggctgagtcagcgtggaacccggtttctccgcctctgccaccaccgcctactggccgctgctccccatccgccggccaccacgcgctcgcttgctggccgccaccgccgctccccatccgctagagagagatgaggaaggaaagagaaagaggaaagagatagggtgaggtggacacctgacatatggggtctatgtgggtcccacgctgactcagccgccacgtagaccaaaaccggggtcaaaaccaccgaaggacctcggacgaccggttttgtattgttaagggacctcgtatatctggtttgcggttcgaggatgtttttatcccaatgacaagttgagggaccttcggtgtactttttccttttgctttccttctctcttgggccatgaattgtatggctgcattaagtctaattttagtccctaaactatttttcttccctcctcattggatcgagccgtgccggaatggcccaccgtgccaaggcatcggcccaggcacgacccagctgtcgggtcaggccggcctaggcacgaccccaatcgggccgtgatgtgcttgtgccaggccatcgggccttgggccttatggccatctatacctccagcagtattttatatgattttgtttctctcattcagaattttgataagcaaacataactttttttagactttatctttatatttgtgaatttttttggccagtagcagaatatgtttttataccaccacctatcatgtgatgatatataattactataagataaattctctattatttacgctaatattgcacactgggaattactcttttatacccacatcaacgcgcggggtatcaacttagttaacatagaggattgatgactcaattagagagcaatacaaatcttgactgttactgttgattgatggtgttaatttggctaattaccagtaactgatgctcatcaacggaagtaattgtgtttcggtttcatcatcctctcatttacctctgcacacatataaccaaagaagggcctagctcctgaatgtatcaaagagacacaattgtacaatactccaccctctacttttgtcgttgcactactgcattcccctcgctagtttctgcgcgcacagaaccagcgagagcaagcctccgaaaccacgccccgctgcaacgtttgcatggacattctcactaatcgtctgcttcatcttatttctagtgttgttcacaagaacaaggactatatccacgatggcgaccgatactgggaacgtcaacaccagcaccgctgcttctggatttgggggattctcttttgggtatgtgtatctacacatggtgttaagcatgttccagatgatttagttcttgttagcacgaacatgtttagcactacatttggatcacttttatgcttaaatgtcatatttattcttttgtttttctagattaaattacgaagaaaaatgactagattttcaacagcaaataggcagcgttgccgttgatggggctggaaacccggtggatggcagtggctgcttggatcatggatttgccttgaagtggggccttcgctttccaaggcaggtggcttcagtggcaccggcggtgacggatcaaggagacaaggattcggcggcgatggctgctctccagcccggatctcttgttttgatcagtttcttttttttccttgtagttgtatcgtttggggattttgccggatgttccataaacaacattgaacagaacatcaacacactacagaaatcgacaagttgggggaggacaggctgcggcggtggctagtggtgacacacatacggatgcgagctgatgaaacgacgtcatgcttggaataggcctgaaggtgatggtgtcgaccttatgcccatgagatcctgaggactaggaggtcgtctctatctgtctgctttacttagttcagattgtactcctgttaaatgaactaggaaggtggcccgcgcgtatgcacgggcacttatattattgaaaggtaagattattgtttgttcagaaattttgtcttatagattaagggcaaactaaagtttagataatattattttataataatttaagggttctatttttcttaacgtatcttaaaaaaccattcacaaacttaagtaggagatggattaagtacttacgatttttgaatcatgtttcttttttctcgaataaataaaaaactattgctagttaattatcatataatccatctatacacataccgtgtagtacgaccacaaatgaaaaatgcgagtgcaagatactcaaaattcttttgattaaatcgtctcatgaaggcgcatgatatagtaataaagagagggaagcatatgcatgggaaaaaaaggaagaaggagaaaaaatgaaaaagggaggggaagcgtacgtacccatgcacgtaggtccgtacctatgccgcgggaggagagatgggacctcgtactatttagtttgttctaagatcaatttaatctaacggtttgtaatattggaccaaccgatttaagtgaaaatcaagaaatagatactttgtttttttcttagaatttctaatatttgccctaatttattagagcaccacgtcgcagcttgagagcattttaaggaattttaaatgacttaacacatgtaattagaatattaactgtgcaatatatatgtatgggacatatggtaatatttgttccagtttcgtccatgtttatatacatgtagagtgaaattaattttgtggcttgcaagcctctaattaatagcaattaattttgacacctatttacaattgttcaaagtaactcttacatattcatcttacgactttaataatttatcaccatgactcgcatgaaaaaaaaaatgtagtacttaaggtttacgatagctgaaattgatgaattatataatttatgtgatatattttttttgaaatggatgaattatataatttatgtgatatttttttgagggtataaatgaatgaattgacttctaaaaagttagaatgtttttaatttaaagaagacactatttagaaacttggaaagcatgcaaacaaaattccaaaatatggaatcgggaaaaaaagagagggccttaaactccctttatcacccttgtcgtagtaagagttctatcaatattcgtcaatattgcgctcacatttataacataatgattcatttcacctatacgaacaaatagtacaaaatctaaatatgacataacacagatacattataattattatgtaatcaactctcggtttcaacttaaacaaagctaattagtgttgagaaaagcacaatccatggtacttaattattctctcactgcatcacacatttaattttcttttcatgttattaacaaaattaatcatctccatatatgatttgatttgtggcaaagtggtagctctacagcggttgtgatcaccttatatgtctcagacactacactttgtcacacatgcgaaaggcaaaggtgcatacgtgtattgtgcagtgggcaaaaagagaatttcggacgctttatttattagcaaacaatagatccgatgattataataataagtccaccagttctagtgtaagttaaattagttaatatagattttaaattgttaatttaatgggtacacaatatagtggtgtagaccttattttgaaacagtgaataatagaccaaggtaatgaaaagtagatctgatgatttatgtaatggggccatcaatttatgtgcatgtataaattaattaatatagatattgtttatttaataggtacatatcaacataatttattttaaaatagtgcattatttgaaaggaagattctttgttatatgatggtagattctttgttttgtaaaattatgattatttaaaaaatatatccattatatatatatatatatatatatatatatatatatatatatatatatatatatgtaaaaaggaaaaaaaggaaaagaaaggaagcatacatacatgtacgtacgtatatactccacctgccacctgccaacgcgcgggaggaggataggtgggacccatgatatttagtttgttttaagatcgatttatctaacggtgtataatattggactcaccaatttaagtaaaaatcaaggggtagatgtttttttttcttagaatttctaggattttctctattttattagagcatcacttggcggcttgagtgcgtttaataggtaaatgtgtaaaatttattttaaaatagtgcaatatttgaaaggaagtttctttgttatatgatggtagattctttattttgtaaaattatgattatttaaaaaaatatccattatatatatatacatatatatatacatatatatatatatatgtatatatacatatatatatatatatgtatacatatatatatatatatatgtatacatatatatatatatatacatatacatatatatatatatacatatacatatatatatatatatacatatatatatatggaaaaaagaaaaaaaaggaaaaaaaaggaaaagaaaggaaggaagcatacgtacatgtacgtatgaacctgccacctgccaacgcacaggaggaggataggtgggatccatagtatttagtttgttttaagatcaattttatctaatggtgtataatataggacccaccaatttaagtgaaaatcaaggggtagattttttgcttttttcttagaatttctaggattttctctattttattagagcgccatttggcggcttaagagcgtttgtaggaagtctcatggacttttagtatataatagatagatagatagatagatagatagatagatagaagatagatagatagatagatagatagatagatagatagccagattttgtttggttactggtagtacttagtacctcgagaggtacaacaaacctcactatcacgagttgttggatcaaaccataacatggatattgtgtagctcaacgtcccaccactagacgttgttgtgtaaagtatccatggctggccggacaccctactaaatagcgtccttcctaattttctaattccctccctcgatttacttatttttattcatgcatcattgattactacaaataaaaactcagttttccttagaaattgcaagaaaaaacacaaaaatatattagagaacgactcaaaggaaaatatccattacgttatacctctttctaacttttcttcagtatctacatgaatttagtcattcctaaggaattaatttgataggatttgaaaatatccaaccctttgcttttaagtagcaaattatttttttgaatagaagggcaggatgactcactacaagaaatatgaccttctgtgatgaattcctcatgacatcggagctactcatcattagcacattccattttatgacgattagtatgagatggggtggcttagtgacgaaaaaaaggtgttcgtcgttaaataccaactagaaatcgtcattgtgacaaatattaatttgtcataaggggcaaaaagcaaacgttacggatttatatatgcatttctagaattaataaaaaaactaaaattttcctttaaaagtcatggccggaaatatttttgtaatattctatgtggtctaaattattctctaaaatttttcgtgaattttcgaagctcaataactagttttaattccccaaatttcatttaacctactaaaataaatgaaaaataaattaaaatccctctctctatccttgggcctttttcggcccatgtgtcactctatccctccctcagcccacagtctctctctccctcctcgggccggcttcaccttcccctcctcccactttgggccaccggcccagcccttttgctcctccctcgctgagaaatctattttgcctccctcctcgcaattcaaataatttttcaggtagtaaatgatttttaatgaaaaagttgtgaacaacaaagttgtataacttatcaggatctacaacttttgttttggtcattttgctatatgactttgtttcaataatttgaatttgaatttcaaattatgacaacttcaaacaatattttcaaatactaaatgatttcaactcaaaaagtcatcaacaacaaagttgtatgactcacaatatctacaacttttgttttggccattttgctatatgactttgtttcaataatttgaatttgaatttcaaattatgacaacttcaaacaacataacattgttcacaaaatttacatctggttttatgtaaattttgtgaacaatgttactatcactttgtcggatgaagaaacaaccaaaaaaaaagttatagatattgatgggttatacaactttgttgttgatgacatttttagttgaaatcatttagtatttgaaaatattgtttgaagttgtcatgatttgaaattcaaattcgaattatttaaaacaaagtcatatcaaaatgaccaaaacaaaagttgtagatattgatgagttatacaactttgttgttgatgacttttttagttgaaatcatttagtatttgaaaatgttgtttgaagttatcaaaatttgaaattcaaattcaaattattgaaacaaagtcatatagcaaaatgaccaaaacaaaagttgtagatcttgatatgttattcaactttgttgttgacatttttttcatttgaaatcatttactacccgaaaaattatttgaatttcttgtattttaaaattcaaattttatatagatcaatcaaactcagatagagaaataaccaaaataaaagttgtagatctcaataagttatacaacttttccacataagttaatttagtatgataaaattcgattcgaagttttaatattttgaaatttccaggttaaatgaccattttgtgcaagtaacttgtataataggtttccagatagcaaggttattctggtaaaatcgcatcaaaattggtacttccctcaaccctagccgattccaaatctgagtccagatctcgttcctcttctttccccaaaccagcgcctctcctcctcctcttcccgcaccgccgcctgattcgacgagacccccgcctcgtccttcctcttgttcgccgacgacggcgctgtcgctggggttaggggccatggcgcgtcgcggttcccctctcctcttctctcacctcgcctcccatggcggccgcgctcctccgccgcacgctccacctccacctccgccgcgtgctcccctcccctccccgcaccggcgccctcctcctccatcgccgctcgccgtgccgtcttactcccacctaaccgcttaccgcgctggcctccgtctccgctaccgccacgctcgggagcggcggttctgccgccgacggcactcctgggcctagggcagccagatcacgtggcggtagtccccgggcgtctcgacgatggcgtgtggctgcatgatgcattgacagcttgtagcggcagccccggggcgctttgattgcctgatttttccgagctgttgcacgatcagcttggaagtggattcgtcaccgcctctccatttccccaccacgtgcatggccaaatgattgcttgagcctagcacgggatttggacggaatggcttaacgaacattgtgttgggctagctagttgggtatgggggtgggtaagttatgtctgccagggtaaaaaagtccttttgcattttgtaaatatttttttccttttatgttatctcacaaatctgaagtccaccttactgtcatccagaacaagggcatactgaagcctcgtttgaaaaaagtaagttcaaatatgcaacctaaagaaatcagaaaaaaatcataactgcaacataaataggagtaagaacacaattgtcttttactttacgttggttagtttattttttttaactaactaactttattatataagaagatggaggaagtaaagtgttagaatttcctttcagacgtggcatattagcacgcaaatgtcgaattgaaaaattatatttggtatggctgaatattgtaccttttgatttctttggagctgcatgttttacaacttcgtaagaaaaaagcagttcatatatgatcttaatctgtttcccctgaatcactggaagtgtatttcctcttatatgtgtgtatgctttattcgcttcactctgttttgcaggactgaaagagtagttgtatacattacaaacaacttatttcatacttaaaaagtcaaatgtttgaatacactatatgcattctagaccaagaattattgagtaatagacattacaagcaacttatttcgacctagttataatttgcaggagagctacgcgggcaataaacacctgcgcaggctgcttaacacagtacacaattcaggttttgtttgtggtcacagtgttcccgaatcagatggaggaagtgtcacttgcaggggatcaagaatcaccgcatttgccgaggccatcatcccctctgccgtgaaatacctatccttttccatgtagacaaagtgtaaaaccttgctcatgagccagaagagcttcctgcacggcggaggaacaacacccgcatccctagtcaccagccttaggagctcaaacctacagccctggaggaccctcctcatctctctcttggcctcctccatcgatgcctccggtgagccgcggcctccgccgctgtgggaaagagcatgcaacatgacgctattgaccttccccattttgatttccttctcgtatgtctgcatgtcattgagaaggcgaccgatagtgttcgcaaggttcattaggtggatgtactcctcgctcctgaaaacctcttccgagagctctggtccgacgaacaatgccgccgaggtgatgatggggcctacagcaaaggagtccacggcagctgacatgtactcctccactgttgttggcacatacttgtccatcctccattcggcctcggtcaacatgcccctcaccgtgaaccaccactgcaaatagattatatattatatcgtggaaaactaaaacctagaagccttaaaagtggaaactcacacacgtagaagagataggtttaccgattcggcgatatgatccacggcattgcgtttctgcagcggcatggccttttccgcaatctgcttgctcgtgttgtaaacagcatagaatagaatctctacacactcggaggagaagccaatctcaccatggtcgtcccacctgtacagcacgatatatattatcacaacaggactgatagatattagttgtacaaaagacatagtgtacaggtgtgttgtacttctctattaatttgaccaagttctccatttcttcttttgatccttcaccgtcaaagaagtcatcgactgtggtcgtcaagatgcagttctgggtccatgcaatgcgggctgattcagaaggcaacaggacggcagcagcactgaaataggttatcgatggcattaatcttgcaaatttcagctcatccaatctggtatgtgccacccaactgtcatatgctcaatattagtgaatgatatcaaaaacatcttattggaatggatgaatcgaggataggtatatatgatcatatatagatagatttcgcacctattgaggtcttggagttcttgttggtagacagattgagaggaatggaattcgtcaacagccaaagccagaatttcatcatttggaataacgccactgatccatgttataataggttcacgatttagacaactacaacagtaaagaaataaattgtacggctgtgatgtgtaacaatgatatctaccggtatcctgatttcagcagcttgaagccctcgatttttagttgttccttggtcttgaattgttctatgttcctcttctgctctagcctttccaagatggcatagactgggcatttcaaggcatactccacctgcgaaagcgaaagtatgataatggcattatgagaaagattcgccttcttttgcatggctgcgatgtttttttgcaagaacatttgttcgctaagatgttatttagtaggcaaatttttctacagaacacccaaagtatttgtaatttgttgatataaacatcataaaaacatgtcatggttggaaaacactctaaaaaattggtaatttggcagaggacatttttagcctaattggatagataaattcttcaaataaacgagaatgccccaatggtcacagacttgtaacatggatgttggagagaaaatttagaaaaatgtgactctaaatttgccatcaccccaaatacattaatactagcaagcagtattttatatctttactcttgctctctttagttggtctgaaaatatcctctagcaaattactagcttttttagggtttccttcaaccgtgacacatttttacaatgatctccagcaaattacataaactttaagtgtagtctagcaaaatttgcctatttagtacttgcctccggtaattctgatatgtgtatcattttggaagatattttttccagtagtactcttgctgaccaagaaccaatttcttctagaatcaaatcatcttccaagcaacgaagttgtgaacttttgtacaactcaagcaaagccttagtatcatttagatatccatgaattgaatcatcaaagctggattgttccacaaattgagccattccatctgctcaatagttccgaaatgattattaatatttccaattgaaattttgtactgcaaaaccgagcaaaagctaggacattcaaatttaagtgtcctgaagctccatgcagtacctgaggtgatgtcataaccatgcatacgtaataggcgaaatgccattgcacatgttctcatgtccaacattagctcctcctcattatgcatccataacctgcaaacataatacaatagaaataaagtagtaggtacaaaggcacatcaaattgccatcattagcctctcctatatctttttaattaggtatttttttatgagttgctgttacctgtatgtcatgtccaatatatcacttatttcacaagcaaaactctcagagatacccatcctttcaagagtatccaccatgcaaagttgtgaataagcattttgcggatacatcaccgggactggaaaacacccatttccagttagtatatttgacatctcatatttctagttgacattcttggtcacttgcttgggcaaaatacatatagtacccggggggagggggggggcacacctgggccaccaaacttgcttgtaacaaaatccaagtaagcgaggccgctatagttgtggccatggattattgtagcagcagttgcagaaggcgagttgaaaatcgatccattcttcctttgatacgccattacctgattccagtcttgtaggttgcctaacccttcagacacatatgccatgaaggctcttcttgatgaagctgtaccataagcatccctgaccatggagatcatcaaatgataacattgaaaattctaaataaaggccccgtttggcacagctctagcttacctagagccggagctgtgccaaacggtccagatcttccgttttctggagcggagttagcagaactattcctagaaaatgaactacgggggtggagctaggtttttgctgctccacagctccactccaccccaaaagacccactaccctttaagtttttagtctatttacatgaaaatgctactcaactacccctccacacctcctctcatcctcacatcttcttcctgatgggcgtctgtggtgacggcagcgggtagcggcgggaagcggcgggcgacggcaacatctgtgtcggcgagcggggcggcagcgtcgacggcagtgggcgacaacggcggcgggaagcggcgagtgatggcagcatctttgtcagcgggcggcggcggcatcgtcggcgtctgcgggaagcggtgggcgacagcggcgtctggtggcgacgggcgacggcgcccgagacgacgacgggcggcgcgcctgggacagcgaacggccggcggcttgttttctttatttttagttttttttcttttttatcttcagatctggagctgaaacctagccaaactctaacagaagctagctctcactgaaattgtagtttagagctaggagttggagtttggagccctatcaaatggggccaaaatataaggacttcttaaggagctccaagtatatttgaacagttcattggtgtttgatccaatgggtgatataatctagagataatataagaaatgctattgacaagcgtccaaatccaagaaatgctacccgataagtgtgagttccaagaaatgtcttcgtacaaatgactttgtcctaaacatgccatcatcgttagggttccgtccattccgcgccgtaagaacactgtcaattcctaacagtgatagcatttttgggacaaaataatttgtacgatagcatttctttgaacttacacttgtcgatgacattttttggatttggacgcttgtcaatggcatttcttggattatctctataatctattaccttgttagaggtaaaacctcatagtaaggaaagaaaacatcttattgcaagtgccattaacaacaaacctaacctgttaataagggaagtataataagtaagtatactccatcccaaaatataaatacttttagagttcgaaattactcccggaatacaaaggcttagaacatctcctgccgattgtcaataagaatcttcggtactaaaagaaactgtcattatttgggttttgggtgctccaacttgatccaacatccctaatggatgaaccaatcccaccctatcctcccaccaccgcctccgccctaccgtctcggcatcccgacaacttccctgccctccatcgcctgtccccgagtgtcgccgttcccatccagccatcctcccaccaccagctctgggccagcctctcattgtgcggagatcaacctctcactgcttattgctgccccaccaggactgcctcatgctctagcgggcatccctgatgcacagcgccctattcctaacctctcccatcgctcattcatggcatcctactgccatccaagagtgtcgcccgtccctgaccttgttctttgtggtgagccctttgttctcaggtcaatagcggtgaacttttcgtcccggtcacgcttcatggtgcagaggccctcgatcttgggttggtggttgtgccagtgtagaacttgctggggtttatggaagctgtgatagtgacctcgtcctctgcggcactgccattggacaaggtctactataggctacaacggcttaggtggtgtttggatccagggacttaactttagtccctatatttagaaactaatttatagtattaaatatagactacttataaaactaattacataaatgaaagctaattcacgagataatttttttaagcctaattaatccataattagagaacgtttactgtagcatcacataggctaatcatggattaattaggctcaatagattcgtctcgcgaattagtccaagattatggatgggttttattaatagtctacgtttaatatttataattaatttctaaatatccgatgtgatagggacttaaaagttttagtcccatctatacagggcctaagtgtgatgctcataggccctcatgaattatacacgtgcaagcattgtttggataaattaattgaggttttcagaacatttggtccctgtagatgtctttgcatgacaaatttgtattttagagatgaaataacattaaaccacatgtaggactatgttgtaatatcaaactacatgagggaagtagtgtaaaaatataaatgtgtaggactattttgtaatattcattgctacgaccattgcattaatagtataatatagatatgatgttgtaaactttttaacatgaagatgtccattcgtcatattaaaattatcatgcaaatattttttttgcggggaaaaaaatatttgcacaaaaattttaatatgacgaatggacatcttcatgtaaaatatgtaaaaatatatgtcatccttgaagtatatttattgataaaataaatcacaacaaaataaattatactttaattcatagtttttaagaatgcgaaaaaatgaaataaaaaatattccaaaatgatgcttccatattttcttcactttaaatatcaaatgttagcaaactctgttgaaactcgtattcaacccatcccctatccattagggatctctaatcttggctctgatcctccctaaatatgtggagttccattgcacttcctatccccattcttcttcttcttgttgttttttgcatgaaattttaaattttgtaggatatcaacaaaatactaaaggtgagtcagatgtatgcttaagataggttagggaataaaaaaatagagagggtgggagggggtggattaaagggactctgaatacaaatatacaggaggggaattcaatgatgttatacataaaaagaaaataaaagtattctataatcgctttatttaatctgtaccaagcaggtttgctttactgccggttattaccatgataatcaggcttaccactagggtgcggtagtgtttaaggtctagtaagccagctaatataacttcaaaaaaattaaacaaaaccttcaagttatggtaaatttctagtttttatcggtttacggtggttcccataactaggctttccaccatgaagagattagccctcccaaacggtaaaatgaatcggagggagtattttaaacgcatgagaattttgcctctatcttctattatatactaaaagtccattaaacttcctataaacactcctaatccgccacgtggcactcctacaaacgctcatatgctgccatgtggcgctctaacaaaataaaaaaattgttagaaattctaaaaaaaaagatttagttagatctatcttcgaaaaaagtagtccgaaaccttcctctctgttcggtgtgcgcacgcatgttagccatccctccctcccttctgttgattttttctctctcctatggtagttaagttagttaaggtaaaagacatccaatgtttttatggccatgcattcatattaatttattggtttcggtagttctataaatagataaacaatcttttaaatagttgtaacttttaaattatatttcaatttatgacctatttgtaccattgtattttttaattaaatcaataattaagatccaaatagactatgatgtaacgctacaaaattattactgctgaactcacattcatcttgaggcctctaagaaaataaaatcaaaatatgccaccctaattttttactcatacactgttagatatctaacaactttgtgcagacttaagtaacttctgtcaacatctacatgaattggtcgataaataagatgatcgatcatagcatctaatttatagatatgatctaataaattaagaaattcgaccatcaattttcattaaatcagtggacccattgttttagcctgttagacctattttatcaaaacaaaaagaacacattcagatcaatttttatctaagtcggtggacccattaattgctttatatcattagatctctgtaaaataaccacatccggaacctccacgtccagtgcgaacatacgtacgtaaatcaaaattatctttacaggttaaaagaacacacaatagacctccacgtactaggtctagcggctctcaaactgtcacttagaatatcctaaggtgctattaaattagagaaaatactattaaattagggaaaataatagaaaaacagacaaagaaaagaaagcatctgaatataggtttctatttaaattaatgggtacattgtttctggttgcagaattttttcataaaaaacatctcaaacctctctcctccctaccctccctgtgcggtgttaatgcccattaacatcgcataaacgcttctaagccattacacgacattcttaaattagagaaaatcataggaattttgaaaaaaagacacatctaaccattggttttgacttaaatcattggacacattattttgaatcgattgacacactatttttggtcattggatctatttttataaaagaaacaccccaaacatccttccctccctcccgctcctttgcggcatgcggtgctaaaagtctattatacatcttataaacactctttaagctgttacattgctcttttaagtgagacaatatcctccaaattctgacaagaaaagaaaacttccaaccatcgatttcgacttaaacatatgacaaatcatttaggtcgttagattaatcatttagaaaaacatgccaaaccttcctccctccctgcccgtgtgtggcatgcaccattcctttactctctgtttttttatctccctgacaattaaaattgaaattatctatatgtcaaagaaaaaccacaaatggatctccacctattacttatatcctgttagacatctaacgactttctaccaacttaattaatttctcttaacattgtccatgtttttctttttggtaaaacttgctatagtacattgtaaattcttgacatttaacgtagaacaatctagaaatttctatttgttataagagacttcagtttagtgagaattcactaaaaatactatgaatctatgatcattacttcaatacacgagagaaaatttaaacatatgcctttaccctgtgcaaggttatatgcacttctattttcatcccaatttgcaagatcaaagcatatcaaggatgattcataaaacataaatctcaaaaaaaaatggacatgaaataaattgaaaaaatgttgttggatttaaaactcattctaaatagaaaaattcaaacattttaggaggattgttagaatgaaaatagatataaaaattaactacagtaataaatgacattattggactattttggggggtgtgggcgggagggggtgcaagatatctttcagggcagtcaaaaaatataaaaaaatttctcatgggaaccacatacattgtttcgacacaactgcacgatctcaagtaattttattttagaatttatatgtagcgatggtgccaacgttcaaagcaaaataagtaaatttaatttagtttagaatataataaaagcattattattaaaagtcacccatacataaatattcataagaaaatttcaccacattaagtaaggtgcccgcgcatgtgcgcgggctaccttcctagttctattaaaggtagcagattgagctatcttcatcgaactctagtgtaccaaattagttcataagctaatgagaaagggtagaaaagtatttctacttgaacacgccctacatgcctcgctgtgtcaccgccaatattagttgacacgtaaatacaaagctaaaaataacaaataaatacaaatattcacacttggattttgcaatggactaacctttccaattcgatcttccgaatgtgaataatcccatcaatatccgtttgcataacaggcaattccaaacccgttctagtggcaaggctaagcaagccagaaaaggtaatgttgaaacccacaggagcaacagtttgctcatccatggcaactgagaaatttcttccaataaaattcagtcctgccaaaaccatttttcgtagctatataagaaggtttcaccctacagtacaaagatctagacaaggttaaaacaacaccctcatgaatgcaattattgattttgtacctctgctgatgtgatctcggccagtattccatcttttcagtgcaacaacacatgccaatgtacacaaaagaatgtctttgttgactaccaaacctggcaggtttgtaccccaagatccatcatcatattggttttgcagtatccactcaatagattgcggaaagcgtggagtttgatgagagccctgcactggcaccatggccacccatgcagtgtcgtatgaagatggttgtaattggacatccctaagctgcttccttatcttgtcatgcagttcattcttatgctgcatatcccatcggaataataaactcaaccatggatatgtttcacaaagcaatgcatgaggtttagttataatactcagctgcgacatggtatgagcacgctgctgtttgatctaccctaaatctgttgatagtcacaactaatcgagtctggttttttaaagctttaataggatgcagtcgttggtgccttggtggccaacgtttatctatcccttgttaaaggtgttgtattgaaattgttgtggtgaaaacctaactttttgataggacaatattggtaaacatatatatgatgttttctttgggagggtactatcgcagtctcttggagagtgcctcatttgcatagatggccttcatgtattcttttttcatatatctttcaaaatgcattttcatcttttgtcatgttgttgtggtttttctactaattttggcagtattttggttgtgcacatctctggctaatcactagtcagtacggaggccaagagtttcttttaatgaattactctataataaaaaaaggaattgctaaaaaactgtcgcaagatttttaggcaaaaaaaaaacattcaattgcaactatagtatagttgtagtataactacaatgtgattacattatagtaacattgtaactacagtgtagttacactgtaactacattataatctctatataagttagatataaagttgcatatattattttaatactgacatacaagttatattatagttatagtggaattatattacaattatactatagttagatttgaaagtttttcccttaaaaaacttgcggtggttttttagatactccctaaaaaaatgggccatgtaccatgccttgctggcttcccgcattcctccctaatcccaggctcttctcaacacctgctgctcctggggaaagcaaaggaaatgtgtgagatatctctttgcaatagaaaggattgtgatagacaataaaatttatctgtctagtataacagcttcgacaactgtactctcaaatacttcctccgttttatattataagtcatttgacttttttcctagtcaaatttcttttaagtttaaccaaatttatagaaaaatatagtagtattttcaacccaaaacaaatacattatacaaaatatattaatttttattagatttaatagaactaacttaatattttagatgttgctaaatttttcaataaacttggtcaaacttaataaagtttgactagaaaaaaaatcaagcgacttataatataaaacttattataaacggagggagtagcaaagaggtataccatatattaagagatcttttgtagcacttgggaggtacctcatacctcttatactgacacgaatacgaggcgctctgctgaactgctttggtattatcccatgaggtgaagctccggggaattgtcctcctgagcatgctgaactcataggaagcatcattcacgactgccctgtaaagatactacacagcatggttttgagttacatgcaacatgggtttatatatgttgaaaaaataataataagataagaccaagtcaccacaatattcagctatctatattactccctctcatcattgctccggtttaccatctcaactattacaaaagtacaattggccccctcaagtcctcaactatgaaagcaaacaaaatagaccactcatctatttaattcgaacacttaaaccgctcgtaccctcttttatgtggtttaggactgagctatcttgatatatcaaatcttgcaaactaaactttatgtggacttcatttcttacatgtgccatttctaagcctacgggacagatgatgggttattctattcgtatgaaatattaacagtgtacttgtgctattctactccctccatcccacaaagactccatttttcagtttttggatgcaacgtttgactcttcatcttattcaaaaagtttctataatttatatttttatttttattagatgataaattatgaatattttatgcgtgactacttttaaatttgtttttttataaatttttcaaataagatggacggtcaaatgttggacacatgacccaaaaatgaagcctttgtggaaccaagggggtatcttccaagtaatataagttgatttgattgtgcaatgaagtctgtgcaaagaaatagaataaaggacgagaaacaagtaatataagtcttaatagcaaaaggttgacactatgtcagacgaggttgtttcctgtatgagcagtggcggagctgtcgggggcgccggagggggtcaaacccccccccccccccccccaagcccctgttgctgtatgattctatgggcaaggccaggcagttagcaagtctagaaaacattagcccattaacaaaaaaacaggttctacaaaattgattaatgacagagatcagagaagtaacacagataaatgccactttgttttcatacgtccatagtttatatggaaatgatttagaaataaagactagttccaaattaagagctgaaattcaagtttttttaataaaaaccctactttacgtattgattattatcagcggtgactatttggcctcttttactattaatattgatcttcgccactgtgtatgagaacacaaacggtagtgttagaagcaaagtgtagagcactaaaaggacacagatgtttaaagggggtcgtctgtttatagattcatcggagaaagaaacccaccttgtacagacgagaggcaggacgtacgctggagaagcaaaacgtagcagaccaaggggggcaggaggaagagattccaagagggaagaactagcagcttatcgttgatcagctttctgcctgcatcaaattaagagggcaacacgcatggaactagcgagtgtgttcaccttccttatatgttgctccccggtgagtaaagggaagcaaccactgtaaaccagagaggcggctgagatcgagagcctgatcaggcagaccggcatccccccgtttgtattaatgcaaaacagtactgtgaagggtttgtggcatcacatcatgattaagtaacacgggaccctacttttgacaagttgttaatctggtgagatggttcctttgctatatatcataacaaaataaagactacaagtccaaagtcaacgcaaaaaaaaaatcagtaaattacactgacagtacataagtcctaaaattttgaaattacacccaaattttgttaaatgtatcgtcgtatatccaaaagtttatacagcccttcaactgctgatgtcccctacggcccttcagagtttcagtgaatcaagcatatatgcttccgatttatacagtggttttgtcctgagccctttgatatctagaaagattaattgctcaaaaaacagttccccaccccccttgtgctcaactagtacaaaaattacatgaaagttccttttataaaaacatcgctcgctcaaagttccagttgtgtttataaggccttatttagttggggaaaaattttaggtttggttatcacaccggatatacaaacacacatttaaggtattaaacatagtctaatgataaaacaaattacaaattccgccagaaaactgcgagacaaatttattaagcctaattaattaatcagtcattagcaaatatttactgtagcaccacattgttaaatcatggcgcaattaggcttaaaagattcgtctcgcaatttacacgcaaactgtgttagtttttttttccacatttaatactccatgcatgtgtccaaacattcgatggaataggtgaaaagtttttgttttgggaactaaacaaggtctaagcgtgcgtacagggtagcgggagaatttatctgtccggtcttgtatattactccctccgtttctaaatatttgacaccgttaattttttagcacatgtttgaccgttcattttattaaaaatttttgtgaaatatgtaaaactatacgtatacatataagtatatttaacaataaatcaaatgactggaaaaaaattaataactacttaacttttttaataagacgaacgatcaaacatatttaataacattaacagcgtctactatcattttaattgtctgtgtctgtatgttgtctgtttcgttcaaatttgacctgccacatgcaggtgcagctaagagtgtggctgatatataaacatagctcttcagtcagacatgcccaaaatacaattgattaaacttgctgtcatatatataaacgaaaacgatatacttgtgatgtatttatggatgtaacttgaacggaacctgtacatccaaccgtaagagtttccgtggttgacggagcagacgatcgaggacggcaaccaggcgcgggtggcggtagaaagacgatgctcatcagtcctgtgtccatacgctattatgatggagcagggctaggttccaaattaatcccgatcgtctgttggtgtagatcagacggctcagaattggtagtactgagcagtaccatgtcgctagcgaggtggtaccggcaaagggatcgtgaagtcgaatagtagtattgttttggggagtaaaatgtcagacacattttagactaaaaattattcagtttttttttccactacggtagtagttaggcttaacctatcacagtgaaccattaatgtgcacatcaatttaaaagggagtatctatctaaatgtcagacacattttagactaaaaattagtcaattttttttccactagtaaggcttaacctatcactgtgaaccattaacttgcatgcacatcaatataaaagatgttgggtactcattccaattctactttagtaattacactatagttacaccctacttacattatgtaagtaggctgtaaatgtagtgtaattagggtgtaattatgacatataccctttaatttgttctgtttctttaatttgttctgtttgatctattctcttgatgtaaaaaaaattgaattaattgcattggccattctttgcctagtatcattcgtggtagcaaaaactcaattaacttgtgccatgggccaacagccatgccgccttgttccactactggagaaaccaggactagaaaccggtttaagcagtacatggggactctatgatcttaagtctcggttggtaatcatttttagtcccggttctatttgtgtcagacgatgtcagggcgccgaggatctttagtcccggttgatatcaccaaccgggactaaatatctccctcccacgtcttaaatggatcgaaccagacactatcttctgcagcggagtcgacgggagaaggggcggcggccgccgggctggggaggcgatggcggcccgcggtaggaggaggcggcgggcggcgggcggtgtgcagcgagcgggaggtggcgggcggtgggctgcgagcgggaggcggcggcccgcggcaagcggaggacttgatttggggatttctttgtgtttttaagaacttgtgattcattggatctatgttgtttgatctgtgatgtatttgtgatgtaatttttttagaatttgtgatgtattttcttttagcatgtgtgaaaactgacaatattagttcttttagctgattttgcacccattttagatcttccatctatatatacagttgacgcgtaaatttaaccataaactaagttaaatgatttgtacccattttagatattctctctccatagatagttcaagtgtaaattttgaccatctacttgtactagttatttattattggaaggattcaatactaatgcatacatagtttttcttgtcatgtcaaactactttctaattcagctttcaagatccttattaattaactacagcttagtaaagcatataaatgaagaaaacaagcttagtgtctctttgtcattttagttcttcaagctaattaatcaaaagcaccaatgataggatatgtcaatgctccaaaacattttctttttttatgtagaaaccctttacagtcacctacattgctaactgtagtctaccttatttaacagatcatggctataatctcaaatgctgatatttctatatggatgaaacctttgctccatgatttcaaggtatctcatctatctatatttgttggtcaagtgaaaattttgaccatctacttctgttagttattttatccttggaggattgaataatcaatactaatgcatactttgtttttctcaaaatctcaaagtagtatcttattcaccttgcaagatcctcattagcaaaatcttagttttagcatataaatgaacaaaatacactagtgtctagttgtcatgtagtttgtcatacacgaattaaactctaccaatttatactgccaattggacttcattttaatttcctttctctcccaagctaaaccattgaggtagaataaaacttaaattaatgttggaagacacctctactgtacatgcacacccctaatttaatcctagttgttgaagaacaggaacaggaatccctaattatttgtcttattcagcttgcaagatttttactagctacaacttagcacatgtagcatcagaataagcatgcaatagtttttcaccataacttttgacttctttcttacccctcagtactagtgcatgtgcatctagcaatcctagtgctagcgcggctgctaatgcaactgctgatttatcaagagaaactaatagaacaacaatggcaaccctttttggtgcaggtcctgccggtgtggagggaacctgaacctggaccttcgatttttttggtgctgcaagtgttttcaggtgtttgttgaaccaaaactgggtatgcttgaatgttgtgtgattcttgaacttggacaagttgatagctttgttctgctacacaaatttttgttgcttgctgtggaactattgtttgattctggagcagagtatctgagactatatgttattaggttgaatctgagatgaactattaattgtttgaattctgttgtattctgattgtatctattattagttaaacctgagatggtatctgttattagttttgaatctgagatggtatgagaaattggattgaatttgcttggctcaaacttaatgggcttgtttagtgggctttgatctgatagtttgttaacaaaataggccagttttgaaataagcctggttctgaaatgggcctattttaaaataggccagttctgaaaaaaaaataatgggctgccattaaaaaattaatgggccgtcaaaataataatgggccgttttaaaaaataatgggccgtttaaaaatatttgctaacattagctgccatgttattagtgacacgtcatcacacacatgtcaatgaccatgtcacctgccatattggctgccttgtggcaaccatctgtgacgtttaatttcatcataaaggttgggcttggggtggactacatgagtccaaaagcgttttatgacggttaaaaaacgtcatagattgtgttgatccgtgacaattttggagaaaacgtcgatagatttaatctattacgctcaatagatgacgataagtagaatcgtcacagataaatttctgtgacgaatcttcagtgatccatgacgaatttttttatcatagattaaatagattcttgtagtgccggtttgtttgtttgtagggattgctccagttggaaacttgtgaatggaaagttgtgactgtaaattgagatgtatttaaattgtaatgatttgttaactttggaatttgggaataatttttgtggattttgggaccaacgcatggatttggaaataatttctgtggatttgggaaaaacttcaacatgtgctgacggaggtggacggagcgccgtcgctccatcaaatttttttagccatggccagtatattgatgcaggtagatgatacaacgtagccgcctgtgcaaattcattttcgcaggcagctaccttacgaaaaccaccagcgcaaataccatattatcactaccctttgatctctggtggtgccattagccgcttgtgaaaacctattttggctatcatgaaaaatcgttttttatagtgataactcaaacaacaattaaataaagttggtgtcaattgatttccaagtataaacttataacttttaaggatacaaaggtgggaaccatggagacgcctgaaacaatgaggcatggagcacttatgaggcctcctacgtcgtagtgcgcgcgcgcgcccacacacacatatataagtataaggccgagtttagtttcaaactttttcttcaaacttccaactttttcatcacatcaatgctttcctacacacacaaacttccaactttttcatcatatcgttccaatttcaaccaaactttcctccacaccctaactagtgtgtgacgcgactggcacagccttcaaaggggtagcaagcacgttagcagtggcaaacttctcagtcatgtccatgtcatcaggcgacatgccgtccggaagccgccactcgaacgcgtgcagcagggacgccagtatgaagggcacggcgcgctctgccagtggcaggccggggcacaacctcctgccggacccgaacgggatgtactcgtagtctttccctcgcaattccagcggaggtgatgaggactcctccttgtgcaagaagcgctccggtaggaattggtcggggctctcccacgccgccgggtcgcgcatgatcgcccacgcgttgaagatcaccgtggtgcccttgggcacggcgtagccaccgatctcgacgccgtcctgcaccgccaggtgagggaccagtatcgagcccacggggtgcagccgcatcgcctccttgaacacgcactggaggtacgtgaggctcgccgcgtcgccctcgtcgaagctctccctgccgccgagcgcgtccgtcacctccgcccgcaccttggccatcacgcggggattgcgaagcagctcggccatcgcccactccacggtggtcgtcatcgtgtcggcgccagccgcaaagacgtcgaacagaaggtacgtgatgtggtagcgtgggatcttgccggcggaggcgaggctgatgagcgcgtccaggaagtcgccgtgccgctgcttgtcagggtggtcacgggtttcggccatgcggcgatcgattatgtcgtccaacaacccgaaaacgatgccaagatggctgcccgtttgtcgacgcaagccctgcaggtcgagctgccggaggaaagggaaaaagtcggacacgttggggcccgcgacggttgcgatgatgtcctctatcagcccgcgtagcccgcgcgccgactccgagcgcacgtcagccatgtccatggagaagaaggaggtggatatgaggttgagcacgccgttgtgcacgacctcgcggacacacatctcctccccggcgaccgtgcggatgtagccgacgatatcccgcaccttgcgctcgcggatgccgcgcagcgccgcgagggctctaggggagaagatgtgcgtcgcgtggatgccccgcaggttcttccactgcggatcggagctcggcgagaacacgatggaccgctcggagaagccgttcgcgcggaaggcgtccgggaccggccgcgcggcgagccgctggtcgtgcttcgtgtaggcctccctcgcggcctcggccgacgacacgaccacggccgtggtgaggcctagcttcagcgtcatgacagggccatggacgcgcgccagtttcgcgagggtttggtggaagatgccgccaaggcagagtaggttgccgatgagcgggagtggcgttggccccggcggcaatgctagtgatctgccgccgctcgcgtggcgccgtctcaggatggtgaggtacaacaagagcgacatgcaggtggccaccgctgtcatccatagctcgctcttcagcttctccattggtcgatgactatttaatttcctgctggctggtgtacgttcttggttgccgcgttcgtgcctgcgggcctccgcatttatacagggcatgcaggaatatattgtattaattaatttgcagctgttgaatatatttatttcctagctttactaattaaaacaagcattgtctttgttctttctaccttacgggactaacacactacttgagaaaccatctttgctaggttagacaaaaatcacattaaccccggttcgaataggaaccggaactaaaaagatctttaaccccggttctaaaccggcacgatactttatgaattttagtcatggttcaaaaggtggttaggccgtatcagaccccctgctatctttagtcccggttgttggaccaaaattcaaaagaaaaactgcagcccgcacatctcccctcgtgctatctcctcggtaaccggtgcctctccactctcttcttatccctacgcttcttatcccttctcatcccttagcgcttcttactagcgcccttcccctctcctctcgattttctctccttcctctcttctttcttggcgttgggcacgcggtggcaggcggcggcggacggtggtgcgcggcggagcgccaaagccgtggagggcgggagcgagcagcagcagcggcggcagtgacggcccacgcggcggtggagggaggtggcggccccgagcggcgacggcgaggcggtggatgcggtgggcaaccgggaggaggtggcggtgggaggggaggaggcgggcgcgccgggaggatgtggccggcggtggcgcacacggaggagaggtggcaagcagcgggcaatccggaggcgacgacttgacgatgattttgggatgattttggggataattttgtgatgtaaatttgtaggtgatttttacatgttttttgaatctgtggatgattttgggatgtaaatttgtggatgatttctagatgtttctatgaagttgcagatgaatatgtgatgtcaatttgctgatgattttgtctgtgtgattgatgtttttgtctgtgtggttgagttcggtgcgaaatcaatatgaaagtagcaaaaaaaataaaaaagaaaagaaaagaaaaaaagaagaagagttaattgcatattggaccggctttctttaccatggtcgcagcttggactaggaacaagctattattttcactttgggctaataatttttacaaaatgttacacttaggacctagtgttcttcttccaactctgcttcctcactctctctaccttcagtttgagattcacatacctggctagttggttttagtagagatagagctcaagctccaccagtacagtcatgctcgagctctactcagccttcgctgcccctgccacattcattcgtgctcaagatttaatgtgcagcgttgattaagtgccctagctccaattaagctagtgctgccatggatgaacttgggctagaatgggacctattgactagttggtggagcagaagtgtggagtgataatatatcgtgttagaatttcccaccgtgccaccgtgattcattggctatgtgcttgagctcaagctggagctctgccgtgtgccgtgttgagctcaagacggagactaccacacactcaagctcaggcgctgacgtaggtcaagcatgtagatggaacctgaggaagtgtggtgagctcgaaccaaaacagggaagagaagagaagagggggagatctagaggaagaagaagactggttcaatatgaaaatttttgcaaagatttctggttcaaactgaaaagaatgtcctacctctagtccaacttgcaacaatggtcaataaaagtggcccaggatgcaatttactcaaaacaaaacgcgtcacgtgacacttttatttttacacccggtggactcaagatggttctttagtcccggatattttaaccgggactaaaaatcgtcatctttagtcccggattctccctcccggttcgctacatgggagtaaaggggttgtgaaccgggagagatgtggggttctccagtagtgacatgacacacgggaacatcttggctgataaattcgcatgtgtgcccgagacttgcgtatgtatgtttcggtgttcgatgttgatgcatttcgtgccggcttgatcgatgttgagtaaatggatacggaatattaattatagtcaagggaggagtactactagaccacggtatcccgctaaacgggatagattatgatgagttaataacgactcattgccgccactaaccacgcccatgtgtcctcacgcgtccgcatcgctctcccaaacccctcacgtgttcgttgcgctcctccgcatgtccatgtgctcgtattagttccccatgcaacttgtgagtaaagatcatttaaagataaagagataaatgtgcatgggtgaaaaaagtgctactaaccccatgcatgcatggcagtgagtaagaaaatatcattatgaggttggatcgtccaatagtttacacgaggcagagcgatttctctcgagcactactataaaactcattttcggcgtcgtaggggatcgattttcataggtggacatgtaattcggagccaaaaccccgccagcaaaaaaaagtacccagggtggagggggcggtccgcttgcgaagattgatctttgcaagcggaccatataagtgtcgcctgcgaagatcgatcttcgcaagcggcagacgtcatgcgcctgtgaagatcgatcttcgcaggcgacgcttatatggtccacctgcgaagatcaatcttcgcaggcgacgcttatatggcccgcctgaaaagatgctcctatatagtcttcttcctctccgagccctgttcattctccccgaagtttctctctcctaaagtgacttaaatataggggggaggttttgaacttcaaatcttcgggggatttttctacggtacttagatctactcatttccacactaggtatgcaactttttaagcttttagaccttaatttgtgatggatttatgcatgcaaaattgtgaaggaagagctccatgttttttaattttatttcttttgatatattgatgttagatgtatgtgtaatacttgatgcctcttattgtagtggtttaatgtggtaacataaattctctttttttttatttttgctatcacatccacctcctagttctagatctagatcttgtcatatatagagaataaaatttttaatgtctatttattcggtgtaataaaaaatagttatagcttaagcttgggatttctcacccctatctttctcacttgtttgtttgagggcgctacgtcgacatccggacacttgtgctagatgatattgatgtacaccatatggaagtagtatacgttttttcaaagtctttacgttgaaaacattgaagaaaaataaaccagcatgaggctgtcgatcgtctgttatcaaatcctcacggagcggacgcggacgttccgactttaattaacgagaaaggaaaaaaattgcggtccgtccgcatccacgtatcatccaattgaatcccagaggctctagtaggattgaagtaattacctgatgatagatcgatcagtccggggcacatgtaatccgagccaaatgccgatttcaatattgatggcgttgtatcttaattttctccttcatgcagcagctagcgactaggaaaagtagttgtgtcattctcgggagtatcttctggtctcgagcatgcgtctacacaaggtacacaggccagtttctggtcggctcagctatcgctgataagaagtagtaacaaaataccttactatattttgttacatgcaaaatttatatgctattatctgctatttaaaagctaaggttccaaaatagtcaaagataaaaaaaaaacccaaagaaaaagataactttatactccctccgttacgaaatgtttgacaccgttgactttctagcacatgtttgaccgttcgtcttatttaaaaacttttgtgaaatatgtaaaattatatgcctacataaaaatatatttaacaatgaatcaaatgatagaaaaagaattaataattacttattttttttaaataagacgaacggtcaaacatgtgctaaaaagtcaacggcgtcgaacatttcgaaacggagggagtacttgttttcaaattttaattttacgaaaatgattctatactgtatgctggtgtaggcaaaaagcacaaccagcgtgcacgacatttcttctctcccagtctctggtagcttttggctattgctggtgtgtgagtgtgacacgagcaaataaccactgtatcaacgagacctagaccgatcatgctaatttctagcgggaaaagcacgagggaggacaattaatagacttcgtatcatccaaatttccttggtgaagaaaagaggccactactttatttcagctacttaatttgtctttttaggtggtcatttctgctactgtactactggagtactccctccgtcccttaatataagcgattttgacattttgcttacacagtttaaccattcgtcttattattaaaaaattttagaattattatttattttttttacttactttattatctaaattactttaagcacaactttttgttttttatatttgcacaatttttttaataagacgagtggtcaaacaatgcaatgcaagtaaaatatcaaaatcccttgtattatgggactgagggagtagtattttcacacacgaaggggattgtgccaacacgcgtcacactgcttaaatgatttttagcaagttatgcagacattttaaaataataatatagtgatcagttttaaatttgagccccattcacaattgaagattagacaaccgtgaaatgtcagtttggaactttggctttggctgctgatgacttctgcacctctcaatccaattaccaggacgaacttaagtaacttgataggtaggtaattaatccgttcagacagttgtcaagttatgctcccttatgtttcttcttttgttgttttaccataattattcattattacttctcctatatggctttaacttagacaaattggcaaaaagaaaaaaaaaaggacaggtgggtgaaagacaacagactagatcagctacaatacgcacgccagaagctaacatattgctatttctctgctgctgcttccatatcccctcctgaaatgtccgatgctcgcatctcgtggtctaaaacagctttgttgacatctgttgttgacgatttctttgatgttggaggatcaaaagaagaacaagaaaacctcctagcattaatggagaagtacgtacaaatcctcattccttgatccagtgtatcttgtctgatctttctcaatcaatgagctaattcgttgtgcaaatggttgtcataggtgggataagcctcatcaacaagagttctatactctgaagatgtaaaactactgtttcaggctctctatactacagtaaacgagattggcgcaaaggcttctgcattacaaggccatgatattaccaagtacttgctagaaacagtgagtctccaatgtgcgatttcttgaattcttttgttgcaatgttgttgctattaacaagttgatgttcaaattgcagtggctagatatattgagatgctactttgtaataattagttgtaactctttttgagtagaggccgggatattatattttattattaaaaaaagatatattgaggtgtatgatagactgaggcagaatggcagaggagccaatatgtgccaaagttcgaagaatacatggagtgtggtgtgacctcactcacgcatggagctacagtgatctcgggaatgttttttatcggagtaaagctcacggacgacataatcaaacatcaagaatacaacgaaatatttaggctggtgggcacttgcggccgtctcctgaatgacattcgaggcattgaggtactttctctcatatttttcaaaattttattagaagatagagtacattctcatctaataaactgcatctttttttataaataacagcaagcaattttatcagaaaattacattcttatctagctccctgcccatgtctggacccaacaagctaaagttctaatgcactgattacatataaaagttatttttttaaaaaaaagtacttacctgttacttttataaatagtaattagccgctgccttgattgaaagcggttaattttgacgaagttttgctgcaaattatttgctgcagagggaggcgatggacgggaaattgacaaatggtgtttcactacttgctcgtgaaagtggtggttgcatgtccatacaagaggctaaaatggaagcgcagaagcgcgtagacaggggcggatccaggaaaaaatagtagtgggggctgaacaaattacgccagcataaatcgaaacatgtctcacatgtaaattggctaaatgtcagttcaaggtacacattgaattaatgatatgtcgagaattttgtccataccaaaccaatatcgaatagataacgtgtcacacccaatcgtctattattcttcatgagtagtaatttatacaaagaaaagggcaaattaacgaataatcgaaacatacttattttggattcaaataatttagagatttagggaggaatggaggcatagagcataccactaatttctgttgaggtactaacatctgacgcgctttcatatcttcaaattgttggatgattttttcatccgattgaaaaaaccctgacttgggtttctttggctaacttaaacactcattactggatggaggatcactttactggatggaggatcactgccatttgtgttgcttaaactaaaataatacgtgagcaatgttctttttgacatgttgacaatctaaaaatgtatagaaaataattataagtttcaagcacaagtgcacaacctcattaagacacaattttagactatctattagtattagaggttactagtttaccgatttctaacttcaaatcttcaatcacagtcacagtaggctgcgactgcgtcgttgactcgttgctgccttgccggccactgtgccgctgacctgctgcctgcctgcctcggcgccttgcgccctcgcggcacctcgctagcgagcggctcgccaccttcccggcggcgtggcggcgcaggcgctggagtgctggaccaccgcctccgcttggcctgcctcctgtctggcccatcgccggctcactggacgccgccacggtgccgcctgcttgccgctcggcgctcgccagcttgcagctcaccggaggtcgccacctgctccgggcatgcactggaccaccggggcaccgcctggcacacctcccgtctggcccctcgccggccgccgccgcctgctcggccgccgcccgccgcccgcgcctattcgcctagggttagggatttaggagaggaggaggtggccagtgggattggggaattggggaggcgggaggccgggagggggagtagccaaatgggccggctggaatctgccaccgtgggcctttgcttggagtgggctagacaaaacttgaagactgcgctcgtggtcgtgggctgctcttcgaaacaagcccaaatcgcgaaataacatcgtcttcaacctccagccttccctccagccaacctgacgaagctccagccaccacatctcgtgaaaaattttagtggggcttaggggggtctccatggaccctggggcggtagtggggtctcaagaccccccccccccccccgcccccatggcaaatccgcccctgcgcgtagacactgctaggaggaagctgttcaagttggtccttagggagggcgctattccaaggccatgcaagcagttattctggaagatgtgcaagaatcttcacttgctttactattcccataccttaccgtacggaatcaggatataatccctccgttttttaatagataacgccattgactttttctcacatgtttgaccattcgtcttatattcaaaaattttatgcaaatgcataagatataaatcacacttaaagtactatgaatgataaaacaactcataacaaaataaattataattacgtaaattttttgaataagacaaatagtcaaacatgtgagaaaaagttaacggcgtcatctattaaaaaacggaggtagtatatgttttcctcatatacatgggaccgcaagagcacgagaataatatgcatatgcatatgtatgaataagattgtctaaatatcctgcagttgcccaagaatttgtgagaaaaaaaatagtgtcacttaagatagtggcaggggcaaatccatcagctaggctctccatcatactctatcccacccctgtaatttttgcagaaagtttttaagtatatatctgttgacagtctttatatatcaaatctgaccatcaactcctacataaaactaaataaaatggaatagcaaacttagtggtaggttttattagtaaccatttccacgagtatggtagaatatttgtatgcagaagattttggatgaaaatacacccgtcatatgacgaaatacatctctgggcaatcatacgtgagtacacggattgaaagacccacaaatcaatgcaaaaccaacataattgaggcctatctaccatgcaccgtcataagggcccactcatcatactctgggaggaagtcagtgggctaagacacggttgccctagttcagccgaaccaggggtggcaccccttgccaccgccttccacatggtgtcttcccattggatgctgatgacgatttgtgggtgaaccgaccctagtaaccgccattatagctgccatttgacattataaaaggaggaatgaacttcactctcaatacacactactcaagtgaagatctctcaagtttcattcaagactactttgtaatagaagttcttgtaaaatgtatactataatgtttgctgcactaagtaagaactgactttatcaaaagataaaacaacaacaaggagctcctttttcaaatgttgcactattttaactgagatccagtccacattttactagcatatgcgatagcatagtatttcttactttaagaatgatcctaaaagtattatcactagcattgcacatggtttcaaacgacagcgaccaatcagtacgttggatgattagtactgacatgagagctttaaggatattaaatgaactcaatcactcaacattaaaggtaaaatgagcatccttagctataacaagcaagttagggggtctagcaactactcctataagactagatagtagatgcagctagagaactgacttagaatggtccaaagtgtaataaaaggtaatcttactaatccaaattaaaaatatagctagagggtgtacaaaagtacaattagctctttttttttcttttgcagttaagaatggtaagccaaacctgcccttaacattctccatgtatcttcaccagataagtagtagagtgagacttacaaaattaggttataggttgtttctaactctcgcaatgtataaataataagctagaacccacatgtcgaacaatagttggttagaaagacaatagataagagaggagtggatttttttttctgatactagatagtactatcgcaacagtgctattgcttaatggatttactacctcctatactacttacccactccttactatcaacatttcatatatctctactcctttaaagaaactttaatgatggtgacagtgaatctgtcacccccttacttatagatggccaaatgggccgttcggcccggcacggcccaagattagtcggaccgatatggctcgctcaacgggcgggctaggccgcgccagcccacgtgctccacctacggccacggcacagtccaataagggtcaggttgtgccgggccaggttgtgccgagccggcttgaaggcacagcagctcatcgtgctttctttcatataagtctattttgccttcctcttctttgggttgtgacatatatatatacatatatatatatatatatatatatatatatatatatatatatatatatatatatatatatatatatatatatatgtatatatatatatatatatatggctaaagtaagtctattttttgtccctcctctttgggccgtatcttatacatggttaaaataagtccattttccctcactcttcttgggggtcgtgccatacatatggcagaaagtaagtctatttcgcctccctgaacttcgtgccatgccgggccaccatgccaaggcagcagccaactgtcaaactgtgccaaagcgggccgtcggaccacggggcatatagccatctatgcccatacgtaactttacatgtttaaatctaaataaatagcttcatataaaattaaattaagaagagtcttcccctatacgaaaatatgggtaacatatttcataaaaaaaatatgtttttatttatttaagaaagtattatgattttttttacccgtaacaaagcaagagcatttagctagtattatggacgcccttagtgctcagtcaatcaccacacagccatttcttttttattcaggccggtcaaaaggggttcaggagttggtagcatcactaatatgctctgttcgtttgggcaggttcccaactcctctttcttgttttccgtgcgcacgcttttcaaactgctaaacggtacgtttttttgcaaaaaaattctttaagaaagttgcttaaaaaaatcatattaatctatttttgaaaaaaaattagctaatacttaattaatcacgtgctaatggaccgctccgtttttcgtgcataggagtttggttcccatctcccccaaacgaacaggggcgtgaacagttggggcatgtggcatcgtctcatctttccgcggatcgccagcacaacacagccatcgcgcccccaaccgccgtcaggctgctaacatgtcaacagctagcaacctggcaccacaaagcaaagcatatcatccgtccgtccgtccgtccatccacggctgaggagcgcacgaaccgacgaagaaaaagggggcaaatcgcaaatccatccatcactttgccgccgccgccgccgtttcctcctcctccctttccgagagagatggggcggcgcgcgcgctgcctctgcctcctcctcctcctcctcctcgtcgtaggtggcggtttccacgtggccaacgcgcaggcgtcgccggcgccgccacagacgggcacgagggcggtcaaccgcgccgtgtccaccgtcatcaccgtcgtcatcggcgtcttcttcgtcctcgtcttcgtatgcgtcatcgtcaaccagtgctgcgactgcgactcctccgctggcgctggggctgggcaagggcagtcgtcggctgctcggcgccgccgcgggctcgacccggcggcggtggcggcgatcccggtcgtgccgtacgcggaggtcaggaagcacaggagcggcggcggcggcgcgctggagtgcgccgtgtgcctcaccgtgttcgacgacggggacgacctccgcctcctcccgcagtgctcccacgcgttccaccccgactgcatcgacccctggctcgagggccacgtcacctgcccgctgtgccgcgccaacctcgagaagcagccagcgccgtcgccgcctgccgtggagttctcctcctcgcctgctgcggccgcggcggcggcggaggagtcgcgtacgcccgaggccgcggcggtgcgggttgaggaggtggcggaggcgagcgacgaagaggagacgaggaggagggaggaggaggccgtggagctggagagtctgcgcgccgtgcggcgggcggcgaggatgccgaggtcgaactcgacggggcactcgctgtgcgcgctgccggcgccgcgcgcgccggggccgggcgacggcggtgaccacgagaggttcacggtgcggctgccgccgcacgtccgggaggaggtgctcaagtcgaggcgcctccggcacgccacgagcctcgtcctcggcatcaggggatcgagccgcgagggcagctcgaggggcggcggcgggagctggcacggcgcgcggcggtggccgtccttcctggcaaggacggtgtcgtgggcgcgcggcggcgtgggagcggacaccagcgcgaaggagacgccatgccgtgatgcggtctgatccgtgcaaagccggcgagattttgtgaaaaaaaatttctctttttatgtagaggaattaatttaatttgttcgcgtgcgaaggctgaaaaaccttgtacatacaccaggttgtttgccatttgaaattattataattttgcttattagtagtaatcgcgtgcacgtaatgtacaaaccgtggcaaatatatttgaaatttcgtttgttttattgttggatgtgtcatcccgtgtgtgttctctcgatcgctctctcttttttgagaaggggatgtgtgttctcattcgttcgttctgcactagcagaggaattattcgtgctcgggtattctgataagcgtgagcatcaagcagggagctttgtctttgtcttgcccctttctcctttcgctgtattatcaggaattcaggatttggtacttttaatgggattgcagagaagggagaattgatgaacgacttcactaatattgccttttctctagaattgttcgcacttgaaagatgcttttaatgggattgcagagaagggagaattgtttttaatgggattgaagaaaaagggagaattgatgagcaacttcactaacactgccttttctctagaattgttcgcacttgagagatgcatgtgtagtgtgtgtggggttttgctaacacgcgatcgctgccggcgcccgcgcccggcccacaaggcccacgcacgcgcgagattttttttttctctaaccaatttctaacgccggtttttacgttttttcttccgcgttttttcatttggcgtttcttttcgctttttttttgcgctttttttttaatcttttagcacacatgttttttcaaatgttttgagttgaaagtttttaaatattgacttaaaaattttcaaatttggccttgagattttcaaatatcaagtgaaaattttcgaatctgagttgaaagttttcaaatttttcaaatctggacttgaaagttttcgaacctcgagttgaaaatttttaaatctcgagttgaaaattttcaaatctcaaattgaaagttttcaaaattttcaaatccgaacttgaaagttttcgaatcttgagttgaaagttttcaaatctcgagttgaaaattttcaaatctcaagttaaaagttttcaaaattttcaaatccagacttgaaagttttcgaatctcgattctcgagttgaaagttttcaaatctgagttgaaagttttcaaatctcgaattgaaagtttttgaatctgagttgaaagtttttaaaatttgaaacttaaatcaaaagttttcaaatctaacttaaatttttttcaatttcttactaaaaatatctctcaaaaaatcttcagaatctttcctaattactactagtatcattagtgttaagtgttaactagtagattaatagataatagatgtagttaaaccttacgaaaaagtacgaattaccccccccccccgaactatcgcgatcgtccgaattacccccctgaaccacaaaaccggacattcttcacccccaactatgcaaaccggacgaattacccccctcgatccaatccgcggtggttttggtctacgtggcagtccagtcagcattttattttttttaaaatggtgggacccacatgtcataccccctctatctctcttcctctatctctctcttcctaatctctctcggtctctctctcgtcatctcgtggtggaggatgcacgccgccgcgcggtgtgagacgaggagggggaaccggacggcggcgtccagggcggccagggaagcggcggcggcgtccagggtgggtgggggaagcggcggcgtcagggcgggctagggcagcggcggcggcggcgacggcggtgtccagggtaggttggggaagcggcggcgctggcggcgtccagggcgggcggggaagcggcggcgatgacggcgccctccaggtcgaacgagggcatcagcggcggtgccctccatggcaggcgggggaagtgacgacggcggcggtgccctccaaggcaggcaggggacccggcggcggcgggagcagcggcgggcacggcgaggagcgggcgctcgtgcgcgggccggccgcctcgcctcgcctcgccgccgcctcattccccgctgcttgcctcctccgccgccgccgcgctcgcctcctccgccgcacctcgccgccgctcgcctcctctgccgccgccgcctcctccctcctccgccgcttgcctcttccgccgccgctcgccgcctcatccctcgccgccgttgccgctcgccgcctcatcccccgccgcggcctcatcccttgtcgccgctgccgctcgccgcctcatcccccgccgccgctcgccgcgccccgcctgccgctgtgaatcgtgagagagtgagagaagagagagaggaagagtgagagaagagaagagaaaggaaaagtgtatgacaggtggggcccacctattttctaataaataaattgctgactggactgccacgtgtacgccacgtagaccaaaaccaccgcggattgggttgaggggggtaattcgtccggtttgcatagttgggggtgaagaatgtccggttttgtggtttagggggtaattcggacggccgtgatagttcgggaggtaattcgtactttttcctaaaccttaggggaggtgctcgctagcagcgcgtacgcgctagctaggagcccccgtgtgcgtggcaatggaagtgtaccattttaacgaggaaaggaaatctagtgaacagaaagaggtttttacccgtttagctttcttctcggttttgaacaattatatactctgtttctttttgttcactaacgaacttttatatatatcctgttggacaaattcatgggctagcctgatcctagctcgacctagccatgctggaccaatggtgggtcagccggaccctaattcagcccgtagagccgactcgaagtccaaaaaaggcccaaaactagttagtgaaacagtaataagaataagttcactagcctgcctcagcttcaagttgagtctgtatgacatccctcgtcccaaataccagaaatcttcaccactaaactatataaaactatgcaatttaagtcctaacagtatggatcattggttacgctgatgtgacatcctagtcagcaaaaagaaattaaaaaaattatgaagcccacatgtaagtaagaaggaaaaaatgtgggatccacatgaccacatcttttttttttctctcttttcttcttctcttttctcttatgttttctttctactcctctattctcttctcttctcttcttaagcgagacggggaggccggcggcggtagaggacgagcggcggcgggtgaagcacttcatggtggcagcccgccccgtcaaggacttctgccccgcgcggagacgacgggtggggcaacgcactgctcacctacccagcgatccgcaacacgacggtgctcgccgtcgaggccaacccgtggaagggcatcaacttcagcgtgcctttcccatcccacttgcacccgacctccaacgcccatgtgctccggtggcaggaccggatgcggcgacgcgaccgccgctggctttgggcattcaccggttcgccgcggctcaggagcaccaagaccgtgcgcgcccggatcattgagtagttcaccgtgtcgccatcctgcacccacttcggtagctcgccatggcagtacaacttgccagggcggatcatggttcatggagctgctcgagtccgcagagttctgtatccagcaacgtggcgactcctacacccgcaagtcaacatttgacctcattctcgtcggttgcatcccggtgttccttcacccagcatcgacgtacacccaatacacgtggcacctccctcgctgcggggcccgtggaggcgttctccgtcgccacgtccacagcagcaacagctaaccgcgctgacatgtggggctcactgtatgccatgtcagcgtgttaagagaaagatagggtcaatattatatcaggaccttttattcacggcttatggtttgtgatagttaataggtagagatttctagtattacggattgtgaaccttagacaaactcgacctaaagttataggggcgtcaggtgaacttattctacggtaatattgaggagtgctaataaaaatattataattacaaaatacattgaatggaatattatatttacaaaatacattgaatggtttttttggttatttttcttttgtggaaaaccatttttggaggaaattaagctcaaaattgcaatgaagttctgtgattacgggttggctgttgaattattcaataataatgttctcacaaaaagaatgaggggaaagggaaaagaaaaaactctctgcaaaattacatttccgatcatcgaattacatactcaaaatacgccattaattactcgctcctcttctcttctccgactcctcccctcgccgactcgtcgcgccgccggcgagacgacccttccgccgccttgctggacttgccctcgtcgtctcccttccacccggctccgggcacgaacagcgacaggagcctcgccacggcgttccgcacggcgccggcgtcgtgggcgctcccctccctgacgcgcacggacgccaccgcgctcgtcacgtgcctcagcctgtgcgacatgaggatctcgaggcggacgtgctccggcagccgcagcgcgaaccgctccatcccgccgccgccgcgctcgtgccccgtcgagttcgaccgcgggagagcctgccgccccgccgcgcgacggacccccgcgaggcactggatcctgatcctctcttccgcttccgcctcctcgctggcgccggcgtcgccgatcaccaccaccgtctcgtgagccggcggcggcgacgccgtgtcctgctccagcgaaggcgggggagggggcggcggcggcggcgcgtcgaggacgttggcgcggcagagcgggcaggtgacgtgcttctcgagccagaggccgatgcactcgggatggaacgcgtgcgggcacgccgggaggaggcggagggcgtcgtcgtcttcgaactcgaggaggcacaccgcgcactccagcgggtcgccccgcgcgtccccgatccggtgccgcctggcgtcgcggtacgacaccagcggcagcgccgcgatctccgcggcgtcgagccccgccctgttgccgccccctcccccccggcgggaccactccgacgacgacgtgtccgccagcgcgggctcgccgtcgtcgtcgtcgagcggccggaacaggcggaggcacgcgaacgcgaggaggacgatgaacacggggaagaagacggccatgaagaaggagatgctgatcacgtcggagaaactcagggagtcgccgccagatcgaggcggcgacgacggcgcggcggccacgggcgcgatggccagcaaaacgaaggcggcgacgttggcggcggcgacgcccatgacgacgccgcgccgcctttgctagggtttgggggggcaagaacccgcgggtgttggttgggtggagtgggctttttcgatcgggtcggcttgctcgctcgtcttccatttagaggccaagccattgcgtgagggatactccagatcagagctgcttccgttacacgttttcagatttgtgcgctttcaagtttgcagcctgttcgtatttactaccagttttagcctccttcggaattcgatttttgggggagtattttaatgtggcccttacaactttggaaaataaacgtgcatgctaatatagtactccctccgtttcacaacgtaagactttctagcattgcccatatacatatagatgttatcgatcgagcatggtaccgatggacgattgcacgttaagaatgagctggttcatcaatgaacagattacctatttgggagtatttatacatttatcgtcaaattttaactactgatgtaaatatagtataattgtaatataattacagtgtaacttgtatataactttcagaaatccttgggacatgctaattccgtgaaaacggaggtaataatggtaccgaatctcctctcatgtatgtgttgtgattttttttctacctctcttgcatgaattttaaagaaaatcgaacggttcaaaattatattgtaagttatatgtaaattacaatgcaattacactacgattgtactatatttacacatgttaaaattttagaaaaaaaattatcgacaaatatgaagtggaattgtgccataatatgtcagagatttgaactatggtggaaattcacgacagatgtgcaatactcctcaagttgcatacaagatgttcttcattgggaaagaaaaggccgcctgcggcgaattcctttggaaaccgaagatactagcccgatgcaagttttttttttttgtatgttcttagcaataaggggcatctatttaatttcgttccgacaatctggatcgctgtggccgacaaagccaagatgtgcgccctctatggacatatattttcatccctcaagaaaatgtcccctcgctgtttgaatgttattgttacctatctggttataaaaaaaatattttttttggataacatagattaatatgaaatggcataacaagcggctggcttggctggaccgaccgatgccgctctttgattaaacttgcatatacatgtgtataggtttgtgcatgttgtagagtgtttacggccgttttgaaacctatgtagatctgtgaccacaatctgtacgtagaatcggcgtgtgctttatgtaatttcattcctaaatcttaatgcatttagccgatgtcctatcgctagcctagcgaaaaagattacatattaattcttttcttatttcatggtgcacacccacacatcactacacaagtaacaccagacacacgcagtcgcaaatacactaactcacgcacaaataaatgaagaccaacatcatatcgctttagtctcactataagatcctactaaagccaacctacacgtgtgtaattgagtataactctggggctttgcaccatccctacggtgcacacagtcattttagtaactgtttagtttattatggtgttagatcagagtagacatgataacttaagagcatcttcaacagtctctctaaatttgactctccaaatgtctatttggccaactctccattcaatttagcaagtcaaattgtcttttaccccaacagcctctccattcgtcctctctattctgagtctatgacaattgggtccacatgtcagcctctacacctccttcttctccctcatctttctccccttctctccaaaccccccttccctctcccatccgtcgctgccgcccatccccatccccaccgccgctcgcgaggaggtgacgcaaggaggcgggcggccacgcgcggtgctgccgtgacgcggggaggcgggaggcgagacgccggcggctcgcgacgacgacctcgacgccgctcggggcagagctcggcggcggcggcagcggcgggcgacgacctcgacggcggatctagagggggcggcggcggagctcggcgggacggtggccggccgcgcgacgacggggcggcggtggctggccgcagcgacgagagggcggcggcgccctcgtcacggtgcgtgccgcactgcagcgtggagagagagggtgggaacaggcgtgggtcccacatatagctagctggctttggctggccaactttagctagtctggtggggaatttagccagcctaatggcttggagaggtatttggctagtttgttgtagtagatttttttgtgtaagttagccaaattttaacttggagagccatttggttaggctcttggagatgctcggccaatgctagtgatcctgggctaattaaactaatcaaattggtaggtgacgtcacccgacatatatataatgatccaatttcttctctttggtccatcaaattagcagcacatttagttggttttctctctagcttcttcttcacataagcaaaccaagaacaaacaggaataatcctagaatcctagaaggcttaagacttggacacatcactttctgaatagctctgaactggtttggtgagtgtatatatgtcgacctctagtgacactcggtttgttggctagcagcatagcagcagagcgttccttttacctcaaccgatcaaattttaatattttatatcataaacctttcaaaattatctgccaattgtgcgcgtgaggggttgtttggtttgctctcaaagtttgccaaaggttgccacatctcatgctaggtaagtttgaccaagttagcatattgtttggttcatagccacacttgtggcaagattccttctcatctattggagccccacatgtcatcaactcactaaagtgtggcacaatccaattttgctagctaaggtgtggctcactttttataagccacaacttagacaagtgtagcataaaaagtatggtgaatggtggcatgaaaagtatagcatccaaacagcccctatagcaaaacttccgtacgcgtcctaagggcacccacaatggttatctataggctctctataagagatccatatcagcatattttcctatttggaagagattaaatgaagagagagagcaaagctatctactaacctggagatagtctatagagaaaaacgaggcaatgtattagagagctatagatacccatgtagacatactattgagatggtttactattaatctagtctattgctgagatgtacatgttttatagataacacattactttaccattgcgggtgctctaagaggcaacttggcatcctcatgttcaggtcaacattgactactgtcagtttaagagtataggactacttgtgagactacgaataaataatgagatgcaattaatgtcacacctgagttatgctgcgtatgatgtgctgattagtaattagcatcctagaaggctagaacaagcaagttttaagtacgatctttgcaattgcaacgaacacaacacaaaaatatagtaggaatataaggtaaaaatcaactccagctcaaggttcatttcttcatatatctgacatgtaagatgcaatctctctttgggtgttcacaactgtacaggataccgagttcacaatcgatttcagtaaatatttttgttttgtatttctttttacccccgagatgatcacaacggcagcatcgagctagaagtgcggccatgccgcgaggggagagatcgccggcctccgccgccggagaaagacctcctcatgtggtgcaagcggccggagcccgacggcgccttgccgcagcaggcagagtcaccgccgctcccctgtttctctttgctgctctgcgtcgtcgtctgctcgtcttcaggagcatcctcggatggcgccggtggcgagcgcgagcccatggaggctactcgccggaaactctgcgcgctgcgcgggtcgggactccggcgcggcggctccggcgagctgggctggtcgcgccgatcgatttgtacccggagctcgtgctgctccccctgctgctgttgaccagggttttcttggtccgcggtttgatcggtggggctcgaggcttggtcggtggctgcgccgccgccgccgccgccgccgccgttagcgccggcgggtggcgggacgcgttccccgtccccggcgtcggcgtcggcgtcggcggggtgcaggacgtgggcgcggcagagcgggcagttgacgtgggcgcggagccaggcgtcgatgcaggggacgtggaacgcgtggccgcacttggggaggaggcggaggagctcgccgtcgcggaactcgccgaggcagacggggcagtcggtggcgccgagcatgccggcgccggcgcggtaccgcgcgagggcgatggactcgatcgccgcctcgtcgagcccgacggtgcggatgtgccacgcgtggtgcagcacctccccctccccctccccctccccggcgccgcccaccgccccgtcgccggcggcgaccggcgcacccggtgcgccgcctcctccagccgcatcagaagggggaggtgctagaagcgcctcacgccgcgcccgctgctggcgcctgcggcggatgaagcagtagacggagaaggcgaggaggatggcgaagagcagggacgcggtggtggcgagcgcgatcaccacgcggcggtggtcacgcgagtggggaggaggaggaggaggaggagagggacagtcgtagcaggcgccatcggagcccggtttcggcggctcggggaccggcggtttcggcggatcggggaagggtttcgccatcaagagagagatgaagggaagctaggaggagtagtaaaaatgtaaaaccagagagagaagaagaagaacgaggcgtgttgaggtagaaaagcgaaggagggattaggggggagtgggtggtgaggcggcgtcaggcggtgaagtcatgtgtcgcggtgaagtcaagtgtcgcgtggagaaaaacggagcgcggggtggcgtcaccacgccgcgtttttgcctcttcctcccggccgttttcggttggcttttcgtgcggtcagctcagctcggttgggacttgggagggttggtgagcgtggacggccgccggtcggtccacgctcaccctgacaaggccgcgaatcttttttttttttaatacgcgaggggcgcattattatattaagaaggaataaaagtatttacagagcggaccgaaaaaatcaaaaaacacgaaggggacaagatacaggagggaggaggaggaagaaaagcctaatctctcaacgaatgtggcgaccttccacccgacataggggtcgccatggccggtatcgcggctctagccaaccgccaaaggtctgcttcgtccgtcatggccctagcaatttccgctcatgtcctgctcttttggttgaagacccgattgtttctttcttttcaaaccgtccacgccaccaaagttgcaatggtgtcgaaccctcgacgatgttccttggccattcttttgcgactgtcacacaaccaggagtgaaaagagtgctcattgagaggcagacactcagaatgaccaatagctgaaagagcaatccaccatagctgatgagactccgagcaagcaaccaataagtgatcaatcatctcatcgcattgatcacaaagagggcaacaagccgggtgtgacggccctcgactccgaagacgatccgctgtccaacaacgattcagtgcgaccagccacaaaaagtaccaacagcgcgggggcgctagagacttccaaattggcttgtgctcgaggctggttcttcctgcgaagaaaagacgatacgccaagcgagcggagtaagaccccgagctttcccaacgccaagagatcgtgtccggttcctcacctagctaaaccaatcgcagaatgtcccaaagcttgagatattccaggattgcctgaatccccaatgccgaacagatgtctcgaatccacctcttgtcttgcaaagcctcagctaccgttcgtctgttccggaaccgagcgggaacagctgcgtagaccgcgggcgccagcgaccgaattgaagagccctgtaggcaataatcctcctagaaccgtaccaacttcccatcgcccactgagcaaaccaaagaaaccgagacaaggttatgttccttgccacggcttatccggcgaggttctttgagagcttattattgcccccgtttaagtttagctttgcttaagaggatgattaaataccgggcatgtaaaaaaaatattaatacttgattaattgaaatttagttattttaaaattgaaaaatgtatctgatatttttaagtaacttctatatagaaagttttcgcatgaaatatataccgtttgatagtttgaaaagcatgttaataaaaactaagatgaaatcagtatcttaataaaaaaaataacaggggccgtatgtattagcagtagtcagtacaacatttttagctcagactagcatcagtcgaatagtcgatgttcatattccagcgagaaaaaggcagccaaacacaagaacagatcgcttgacaaagactctggcagcatatgcgtagtgcaagaaataatgtaaggatccaaaggcttcccagaacaaaaattctttcaatattgggagttagattcatactagtattgccttggatctcagtcgatatttttatcgccagtcttctcaattcaggtaaggctggagtctgtacccgctagggagcagtttatgtgtgtgtatatatttacagtaataacccagttgtgtggctgtggattacaacaaataaagggatacttttattacgcccatctttcaacctactgtcagctaaaaaaaaattggttcaccacgaacatatgttgtagcataatttgacaaactccatcacataagattgtcgtggattagaatgtgaacctgagtccgattggcctaatgctcccctttggcaccattgctgcccgtctgatggctagcttggccattggccaatccatatacatgccccatctttgttctctttgtttccaggtatctccgattctctgaggtgattggagttaccaagggaaccctgcccacaatgctcaatccataacccttgagaccaccatactttgctgggttattagtcatcaacttcattgaacggacccccagatcacgtaatatctacaaagcaacagtacaaatgtcaatccattgaacaaatgaaatgaatgcatggtaattcttaaattgtctccatgaaattgttggcagcatcaaattcatgacaagaaaggaaagcgctaagcaaggcggccaagtccattaaagtagaaaatatattttggttcagttgggaataattttttatttcatctacacttgttggttgtatgcatcagattctgaacatatgcctttacagcccctcaggcctcaacgtaagcaagttgaaacatatgctatgaacagatatataaaccacatggttctttattaagctggtgtacaaggctataagcagggtatgacattttgttttctatggccctgtttagatcccaccccaaaatttttcaccccgtcacattgaacatttgaatacctgcatgaagtattaaatataggctaaaaaaataattaattgcacagattgcaactaatttgcgagacgaatcttttaagcctaattgctccatgatttgactacatggtgctacagtaaacatttgctaatgacggattaattagacttaataaattcgtctcgcggtttactgatggattctgtaattagtttttttattagtgcccaaacaccccatgcaacaccctatataatatctgatgtgacacaccaaaactttaaacccttggatctaaacaccccctatattcgaatgccgtatgataccatgaattccttacctgtgcaccaatgccatattcccgtgaatccacaggcagtcctaggtcttcattagcctccacagtgtcgcgcccgtcatcttgcaggttataagcacggagcttgtgaccgagaccaatacccctcccttcatgtccacgaagataaactagtacaccccttccagccttctcaatcatctccattgccatggcaagctgatcaccacaatcacatcttgctgatccaaaaatgtcccctgtgaggcattcggagtgcaccctcactaaaacgccttgaccatctccaatctccccctgtcagtgattggatgagtaacttaaaagtcaggcttatgacaagaaaaaaaaaactgattcagcagctaattccaacacaagtattttataatatttcagcaacttactttcaccattgcaatatgctctatcccatcaataacagatctgtagcagtaagcgcggacattaccccatctcaaaggtaagcgtgcaacagatgaacgttcaactagcctgtctctttttctcctatatctgcagaacagaaagataagaactctcagagtctcagtacactaattggcatgtcaataatcatttcaagggcatagaggaatatcaaatagcagggcaggcacagttgcaacccaggggctactacaatcaacacaattcgagattagtttgtgttattatctaggataacagatacgatggcaatactaattgcaagaagaatcttttattactaattccatgacatatgtgttcacaccaatagataggacatcacgacaatttcaaggagaaaaataatagcatttatatctcagggaagttagagcgtatatatgttcccactgatagcaactactcatgattaataggccaaattggcctatattataacagtttaaatgataaagttattgatatatatcctggttgcacatgcagtattaggagctcaggtttgtgtactagactcacctaatcaagtcagcaatggatacaatcttcaaattctccctttcagcaaacacgcgcagctttggtaggcgagccatggacccatcctcatccacaatctcacataagaccgcagcaggaggtaacccagctaacatagcaagatctacagatgcttcagtatgtccagctcgtttcagaacaccaccctctctgtatttcagagggaaaatatgaccaggccgattgaagtcttcaggcttagagtcaggggatgcaagagtcataactgtctttgccctatcctttgcagataccccagttgttgttccctctttagcatcctataagccaaaagcagatgaatttcatctcagtagctcaaacaaatcatcaaaacaaatttgttcaacacaaactcacaaggcaggatgtttactctttcattatgaaatggagtaactaaactagtaagtaggctgtatctgttccgttgatttgaaaattttctaaagaacacaagtttttccttaggttaaatactgttggtcagcatttgatatgcataacaatgatgaaaggagcaatagccaagttttagacgccttaacaccaaactcatcatgagtttctctggaagcctccatagtgagtgttaggaatgattacactctattatggcaatttactttcagaactcagatctaagatggaaaacaagtaatattttagtaaagtcaaatcactggtttaatacaactttgttttttacccttttttttgttagaaagctgtgtgcaaaaggaaatgcacacctcatgccgtcacatcattaatatttaaaactaaaaatgtgaagaacaatttttatgagttacattttggccttttgcagaggaaaccaatggtaaagtgaataagcatacgtatgcatgcatttgacagttaagcaaaatttgatatccatagaaattcataacatactattctagtgctggcaaaagaaagagaataagaatggcagcataccactgtaacagtgaatgcagtacagagcttctcctcattttcctttgttgcaaccatcaaaggaaggttcaatctttcaagatcctcttctttcatgctaacacacactattcctgtgccatatcttacaacaaacgccatggcctctggggtaaccaaagaagcagccattataagatctccctcattttctcttgattcatcgtcaacaacaatcacaagctacaagagcaacctggtgtcaggagaattccatagagcagaaacggacaagatatgaaatgagtaaaaggttagcatatactgacttttccttgttgaatatctttgatggcctcggaaatagacgagaagccctcagttgggctatccaaatcttgttcagtgtctttgtcctcatctgagaacatgtccgcaacacatttcaaaccagcattactgatttctggcacgatgatggattccgttgggagtacagagtcagcagttggatagtcctggccacgaacagaagtgctctttggtaacaccgtgttatcattccctgagtaaccgtcgcctggaaaagcaccatcccttttcaatgatgctgctaccctcaagcccgtaaatttcacattggcattatttgaattcgcaacgggtgagaaggaaattgatccctttgcttccttggagactgcaccgcctttcacgaactgcaccctgcatttacacaaacagaagtgagtagaatcaatcagattcagcaattaatatatataaactcttattttaagtacccctatatattctcattaaaaaggaatgagtaaaactagtatattttacagtcattcctcaaaggttcttacgaccggatttcaactgtattatgtagttcgctcaacagctcgctcgttactaattcacttcaaacagattctgacatgaaactagtgtaccagtcgtcaaatcaaccaaaacactaaaagaaaaaagtgaggccttagcaaaaggcataatcgagccggaaagaatccggaagtgtaaccagctccaaaggcagcgggcaagcacaatcaaggcgtagcagcgagagagagaggaagcagagaactcacgggtggccgcggagggcggcgaccgatgaagacgtcggcgaaatcgacgccatcccgatgcttcccttccgacggaaggagcaggcctgcaatcaaacgccggagagcaccaaaaaaatcagcaaaccgcacatcaccatccccgaaccactcaaaaatttccaacccagcaacgctaagatctggaacatcccggccgaaacaggggggcacccggggacgacgagctccctgatctcgagccctccacccacaagaggccgaacccaacccgacacgtcgcgagagggacgggagggaatgcctcacctcgtacgtacgcgcgcgcgggcgggcgggttggcttctcctccctccggcgaagtccccggcggcggcggcggcggcgagcgagcttcggctttttttggtggcggttcgatggtgggatgggggggtggtggtgattagggatggggttggtgtgggtgtggaaaaagaaggcgaggcggagcgcgtaattttataaacgcacggccacggggcccaccagcacacgcacacacggcacgcaggttcgcggcggtctcgtctcgtactctcgtctcgtgtgtttatttatttacggctacaccggtacagtcctggtggtggtgggtttgcgtccatccagcccggatccgctacagaacaagtgtacgatttcgattttcttttaaggctgtataataagagcacgtagagctctaactcataaaattagggcatgttgacacagcttcagctccagctccaccccagctcagccaaacagtttcagctccacctaaattgggagttaagctgggtggagctctctcacaaaatgaactagagttgtggagctaggtttagacagctccacaattccactccaggcccaactccaagagttaaatttaggagttggagctataccaaacaggcccttaaataaaggaattggatctggagtggagttgtggagctgactaaacccagttccactcactctatgagagagccctacttagctttgcttctattttaaatggaactgaaactatttggctgagctctatgaaaggtggagttggagatgtgctaaacaaaccttaagtataagacggtcaaatattttagttgatcacaataaaacattatgctatatatagtgaaataaaataaacagtcaatgaaacatttattttttttaaacattatgttcgtctataaaatattgagtattaacggtttgaaatatttgtttttatttcatcggaatataatcatatgatatattgttttaaagatttaattataattaatacaactatgtgatcaggtcgtagatcggatatagtttaagagaaaaaatattttaaagctcgctaatgcatgcatgtacaaataaaacatgattaaaaaattggtgtactaccaaagttattgtgcgcatagcgcattacaacaaggaaaagttcctagtggaaattagtgagatcaaagtattttatcattgatttctttgtgaacatgatgagtatgatatgtgtagtctacctccgttctaaaatatatatagtaacctaagcttagataagatatatcctaatgcaaatctaaacataagcttaatactagaatatcttccatccaattctaaattgctactccctccgtttttaaatacttgacgccgttgactttttaaatatgtttgaccgttcgtcttatttaaaaaatttaagtaattattaattttttcctatcatttgattcattgttaaatatacttatatgtatacatatagtttttcatatttcacaaaagtttttaataagacgaacaattaaatatgtgctaaaaggttaacggtgtcaaatatttagaaatagagggagtatatattttagaacgaaaagagaatctatcaactaaaatacttttcaataactattcataccaagtggatgaaaagattatggcaatatagcgatcgatacacctacgtggcattaattaagggctaatgttgcatacatttgcataactaatattaaaccattatcgaatcgtttttgttgattttagctttttgttaggaaatccgaaacaaataaatacaaagttttactttccttcgaattttaatattggctttcttccgttaccaaaatttgaattggcaaatacgggcatactttgatagtcttaattttcatattttcttaacctaataattttgaaatacaatattaacattaacttatttgtgcacattatggactttgttgcgtacaaatttgtagtcctaacatgtctgcatacaatccttataaactagatggcaccccacgttttgttgtgggatatataaatggatatatgttaaatgttgtataataacggatgaatttggattgaaatattttgaaaatgatttagcatgtgtattttgagttttagaatgtaataaattataaatttaattactatagtctatacttgtatgttgaagtttaggtgcttagtgggttgatgcggcaagctggcatgtttcgtatcctattactacgtatctggacattgagtcctaagttgctttattctgggacggacggagtactatgcttacacgttgagttttaggtgtgtagtgattataattttataaaaatatagatagataaaacaaagtagtatagagtctctttattagcgacaaattggatcaatcaaagatactagccactaacctcataatttaatacggatcgtacttaatgattactaggttgaaatagtgcatcatcacgtgtcattattcattagttagccgccccaaaaaaacgcacgtaacaaaccaaagctcagctagccaagtgtgttggattcgttcccgggcacgggtcgccacgccaaggcacccacccgataagtcgccgtctcggagaccggatcccccactcccccaatcagggcaaggcaaagaccaaaggaaaaaaagagaagagcccggctgccgcgagcgatgacgatgccccgcgcgagagccactggatctggatgagatttgaccgagccgacctggtgcaaagccggcggggcccacctacgctttcttcttttttttttttgagggtcaagcgagaagcggagctcgcttttaatttcgtttccttttcaagctcgttcttctatctctctgcccttagctgtatttagatccaaacttttaacttttttcatcacatcaatctgtcatatacacataacttttcaatcatgtcgtaccaattttaaccaaaacgttcaactttagaagaactaaacacagcccttctcgtctcccgagtcccgacgtgtgattccgaatccggtgacgacgatgccgacgacgcctcctgccagagggagggggttccgttttttttttttacgtgtgggtgacagcacgcgcgacgtcaggatcgttcgcagccgagaccgccgacgtggaataaattaatgatttccggcacggccacgcgggcgaaaaaaaaatgagtgagccacacggccgcacgtcgtccactcgtacgaggggtttctcgcgcagcatgcggcttcagcttctgcatgggcctatcacaagctgaagctggatgttgatcgctgttcgcagatgctccgtgggaaatactagatcatctgcgattaatattactactctctattttactctaattttaaggcctatttgaatcaaaggatttatgtagaaatttcataggatttaaatcctatagaaaattttcctatttggctatttgattcaaaggattgaagctttccaaatcctataaaattcctatggaatggcatactgcatgtggattttggaagaaatttagcaagagctccaacctcttggaaaatttcctttgagtctatctctctcatctaattcctacgtatttcctgcgctccaatcaaacgatcattcctgtgtttttcctgtattttgcaatcctctgttttacacttcaattcctgtcagaatcctgtgtttttcctattcctccgttttttctaccctgcgattcaaaggggcccttagatggtggctcaatcctatagcaagagaattcatacgtcactgatccagttcagcaggtagaattagggcaaatactataataccccatatattgcctttaaaagtgtcacattggattgagtgatgaggtggagaagagaagcaggggcggagccatgtgtggggcagcttgggcttgggccccacacgtggcaaaaatttttaatggagaaacactgaaatttacgtagaatttgcacaaaaaatttatagctatatggttcagccctactcttgctaaaatgctgcctccgcccctgaaaagaagtgaggagagagatgatgagccacccctaaatcaagaggcaacctccacaaaaatttcaagaaaggtgtgagagtattagatatattggtatttgtgtactagaggtgatacattatatgggttgcctcttagttcatgagtgaataaaatagataaatttggaggtgatagtcacatctaccatagcacttgcccttacataggctgtgtttagattcaggggtgtaaagttttggcatgtcacatatgatatatggacacatatttgaagtattaaacgtagactagtaataaaacaatttacagaatctgcctgtaaactgcgagatgaatttatttagcctaattaattcaatattagcaaatatttactgtagcaccatattgtcagatcatgtcacaattcggcttaaaagattcatctcacaatttacacgtaatctgtgtaattagttattttttttatctatatttaatactcaaaattttgtcagggaattagtagacttatatttgtctggtccatgcgaatgggcaaatgatggcaccatgcggggcctaagtgtgtgcccctactgccatgcacgcatgacactcatgggaatagatacggagtaattcggataatatactgttcttttctgaaaagatattccagatcaaaagaaagaatcgttgaacaaggctaggaacgattagtaccagcaaatcaatccgctgtgatgcgctcaatgtagaagtgtgaggaaaaaaattacttcctccattcgacaaaaaccaatctagtaccaaatataacacatcctagcgcaacgaatccgtacagctcgatctagtacggatgactggcataagcactctccctatcttctatggtctggaaggtgtgggtggtaggggtgagaggaaaaaaagttagagtacgatgaatctagatatacatctgtctagatttgttgtactaaaatatatcacatccagttttagattcatttttttaaggacggagggagtattgtttagtcttttaactacatacaaactcattgtatttatttagttctttattagttagtgtattattatgttaatatatgataacattgtaaattcaaatttctaaaggtttataaatgaaataaatcttgttaacgagcctaattagcttacaagcagaactagtgttttagctcgttaaggttcacaagccgatccgagctatctcgttaatgtaataagctcaaatgagcctaacttgctcattatccaccactttaaggaggtagggctagacctagaattttagatggccctttgccaactagctccctcttttttctagttttctttttcgaagcacatcacaaattgactataaacatggacactcataaacactcttgcacacagcatttttataagcacctttgaaattgaggtggcatatcttgagattgatgaagtcattatgttgtcgatgagtacgttgctagcattgtaagaatagttagccgcaaacataaacacccgtttcaagtctacaaattaaatccaggtgggaaggttccaccacaaatatcctaaccagctgacgccaattcgcatgctacgtcttttcattatggatttactatgtattattcacgccatgtttttaaatttcttttctaaaaactttcgatgctagcattaattatataagttgctctaagttattttaatttatagtatattttattcattcatataaaatttgttcataatatgtaattattaattaaagaaaaaaaatacgaattacactccaactggatctggataagatttgaccgggttgaagtggtgcaaagccggcggggcccatccgcgctttcttcttttttacccttttttgagggtcaagcgagaagcggagctcacttttaactccgtttccttttccagctcgttctcctatctctacccttctccctcccgacgtgtgatcctgaatccggtgacgacgacgacgctcaaagggttccgtttctttacgtgtgggtgacagcacgcgcgacgtcaggatcgttcgccgccgtggagaaaataatttccggtacggccacggccgaaaaataggtgagtcacacggccgtacgccgaaaaattagccattggatgtactgctttgcatatatcttaaatgtagccctgggatgcctttgcgtctgtgatatattgtgttgtatatgtgtggccccatgaacatgtgaattaaatgttgtctgctaggttcaataggttaaccttttgctccattggataacctatttatttaatgggatcattaagggttgtccctattgaaccatggatcagagtggtcacgtgaaatggtttaggttcaatccagaacctaaccattcccatccgcagcgtgacaggctgaagctggatgttggtcgcggttcgcagatgctccgtggggaaaacgcacaccaactgtccacggaaacggattctgctgcagggctcaaaattccggaatgaaatttcagtcatttctgaccctcccggtatgatattattttggctgaaatttttaaattttcaattttttttatgaatttagtaatattttgttcaaatttgaccgacatttgttcaaaatttcggaatatcggagacctcgtgtagaatcgaccaaaccgaaaaattaaaccatgttctacagtactgtcctttaatttttggggcgattacaccatgctgactactttcaaccttaacttatgttttgtttccactttatggggtttcatttttctcttattttttgaaaacgaagcagagttttaccctggtttcgacggttagtttgatggtgttaatttaagggcgaaaagatagttatacttatacccacacacctagccgtgccactttcttcttggagctgttagccaccaagctgattgttggcccgctctcgccgtggatgggacgttggagtagtggagtccaccctcaccgttgtttgcttgctggagacctaccgccacctcacgtgtgtatttactatcttcgtctaaaaaaattaatcctaactatatacgtagataattgattttttttaattacgaggaaagtatgtccatggtatgggtctgtacgaatggtcaaatgattggattgggcagcaccgtgcggggcctatgtgtgcccctactgccacacacgcatgacactcatgggattatataatttggataatatactctgttcttttttaaaagatattccagatcaaaagaaggaatcgttatcagtacatgcaaatcaaatccgctgtgatgcgctcaatgtataagtgtgaagaagaaactataaacaagtacaaattctctcgacaacgcgcgtgacggtgagattgaacaaatcctgtatagcccgatccagtaccccggatgactggcagaagcactctcactgtcttttggtctcaaaggtgtgggtggtaggggtgggggaaaaaaagttactacttctgtctcaaaatagttataattttaattagattgtttagcatatgttaatatttgaaaagaagtactatgatactccttattaaatgatgtacgaaatataagttaaagtaggagagtagttgatcataatagggagaaatttgaactagaagtgattaatgtgatcattagtatattctattgtgacaactattttagaacaaatttaaatcatagaaataaaattattataggacagaggtcaaggtggtacttagaagctttgtcactcgaatcagcttgcattgaattcagttcggatctcttaactcaaaatcataacaagttaaatcgagctaggattttaacacataagaactagtgtttagtcttttaactacatgcaaactaaaatgtatttattaagttctttattaattagtggttattattttgttaatatatgataaaattaaaaattcaaatttatataagttgatattaatgagatagacctcgttaacgagcctaatgagcttaatgaactaacttgcgagtggagctagtgttttagctcgttaaggttaataagccaatccgagttggctcattaagataactagaaaggaagcccacgcagatgcgcgggcatcttatttattgtttatataaatactactaagagaattaagtcatatcttaccatatacatataacaaatcatagatcttgcctcatagtaacaaaacaatatgttgtgaaatagaccgcaaactttaatataaataataaggatgtctcttagattcaaacaaaattcacttttgtccaggtaagtgtaaactctcctattatcaccattatcattgttattaaaagatagatatgattttaataaatggaactccatctaaaccaccaaaataagtctaatacatcattaatgcataaaacattctttcaactatgtacctaaatgtttatgtcaacacttatttctaaatctacgaataaatattctaaaactaacgcttctattggttattagcatagcaccgttaaaaaaatagacatgcccctctaatgggtggaaccatcaagattccttcaagcatgggtcaacatagtcatgcctctcacagtctcacgaccagtgtggagcacaattttaattaatcctagttcactatcggcaccctcagagataattccattagtaagtaggaagttgagcactattatcaatggtggcctccattgggcctgcctcaactcaaccatatatgtgctccatgctatacttgtggtatccatgctcggtgccctctaggggaacaaagagaagatggatatgatgcaaatagttctttagttcttcctataaaatataaaatatagtttctttatgttttgtttagacaaaattttgtttatggtgttaatcaaaactgcttaattttttatggtacaaatataatgtaatatttagaaatgagtgaagttaatcactaaaaatatatatagctaaacaaactgtgacaatcttcagagtattatatcattgtatattttgacaaagatctatatttttagcatcttgtttgttttcgtcacctataacatgagacacctttactaattctaaaattgtatttattttatgaaattatttataataactaatttattgaggtgcacttatagttacgtcactgtggtttatgaccgttatattggattaaggggtcgtattatagcaagatcattgcctgagcataccaatccagtagttatgaaaaaaaactttgagaatctcaatctcagacaaactaaaattaaatcagatataatttaaaaacataatgttgtttcattttccatgcatgtagatttcagttagtgttatatttgaccataaaatatgatgtgaaattatttctaagattatcatgacattaattattatatgccgcctaaattatttaaaaaagtgttatgatattacttattattatatgttagctccaagtgttgtaatgtatttagcactataatataactatgatattacacctgattataagttgactataaaatttaaaaaaaatctaaaagcttagcgtttaaacacatttaatttgttttttatattgatctagtttaacttgcatatttattttttggagtgataaattttattttatcgtatagaaaatcctattttgaaaaccgtctatattttttcgatggttctgccaacttatattagtattatttgggctttatagctttattgtcgtgtgttcgtatgtttctttgttttttttccaatcgaacatccggtaaatggtttctctcgtatacacaggagattaaaaggaagcgggctaatctaacgattcaaaataatgggtccatcattttgaatgaaaatagacaatgaaattatagagtgctacatggcattctaagagtgcttggtgaaacgccacgtgaccatatttgtggagtgataaattttatttttatagtatagcaaatcatattttaaaaagactgtctattacgtacttttttaagggaacaatatatctaaaggtttattttgttttatagctttttttatcgtagtacgtactctgataaatatttttttctcgtatgtacgtatgtttctttgtatttttttttcaatcaaacattcagtaaatggtttctcctatatacgtaggagattaataggaagtgagttaatttaatgatctaaaataatggatccatcattttggatgaaaattgatagcgaaattatagagtgccacatggcattctaagagtgcttgcagaaactccacatgatcatatttgtggagtaataaattttgtttttatagtatagaaaatcgtatttttaaaagaccgtcattttttttcctactgacgtatatacatttttagggtttatagcttttatttttactcatgtatccgtacgtacttttttagggacagtatctaaagtcttattttgttttgtagttttttgggctttattatcgtatatatgtatgtttctttgtattttttttcaatcaaacattccctaaatcgtttctcttgtataccctggaaattaagaggaaatgggctaatctaatgttctatcattttaaatgaaaattgatagcaaaattatagagagccatgcatgtggtggtgtaagagtgcttgtagaaacgtcacatgatcttattatttgtggagtaataaattttatttctatagtatagaaaatactattttaaaaaatcgtctattttcttgtaccgacgtacatatgtttttttagtttttatagcttttatttttactcgtgcatatggaagtaattttttttcaagcgaacagtatctttttttaaatagctatttatcgtaagtaggtacttttttcaaatgaacagtactgtacgtgcgatcacacgatgccatcgtacgtgcgtacgtatgctgaaggtttcgtttctttccatagtaagtacgtaagtttttttgtgtgtgaacggtttcactcgtatctaccgaatattaagagaaagcaatagatttaatctaatggactaaaataacagacccatcaatttaaatgaaaatcgacggtgagattataaacctaggagcgtttttaggagcgtttgtaggaagatttatggacttttagtatataatagatatatagataatagatgagcccaaacgagccgagctaggttattatccaccgttttaagtagataggtctagatctcgaattttagaaggccctcgtgctcactagctctttttttttctcatttcttttctgaagcacggtacaaattgacttaaacatagactctcataacacacgcgtacatcatatcctgatgagtacctttgaaaattgagttggcatattttcatattgatgaagtcaccatgctatcgatgagtacgtcgccaccaataaaaaaataattagccgtaaatataagaacccttgtcaagtctataaattaaagattaaatttcactttggtcacccttgtcaagttttgctttgtaccacctttaaccgatgttttcactttagaccaggtaatcttacctttgttgtactttgaaccaccccaactctctacttaagcatatgaacaatttcgagtatgtcggctcctactaatcaatgaatttctatggttgtgtgtataacattgatatatgtcaagttgggtgtaaatggataaaaaagttagtggtagtccaaagtgccacgtaggtaagattacccaatccaaaatacatcggttaagaaatagtctaaagcgaaacatcggtaataaaaggtgatctaaagtgaaatttactctaatttaaatgatgcactggttgggttggcctaggaaagggaatgaaaatagtcacggtcgactgagcatcgttccatataaatgatactatttcatttagttatcgattccaaccatatataaaacttgatttttatattttgtctcagcgttgtattgatatcgatattgaataattaaactgataagtattgttagttattaataacgagagtcgtttttgaatggatgctactgattccaaccgttcatccaacgatagtgggcggtagggggcaggtggtggtacagtgaggtagcggtggcatcgccatccgtaggaaatgaagggacaattcataattaacctgatcgtcgagacaagctcgccgagcaggaggcaattgttgagcttgccggtgtcgaatatgccggcatcgagttcagcggtgttttgcccaagagaaggaagaagggaacgtgttttggaaggtgaggtcgccaggcagccgggaggagttgagggaggccgggcgcggcggcgcatcggacaacgacagaagtcaatttggcctgcggagcccaagatgatgggctgcctggtggcctcagaataaggaataagttcacattaggtccctctatttgtcgtccagtccgattttcgtccctcagttgcaaaaccgggtatgacgggtccctcaacttataaaaccgtgcaaaagagatcccttggtagtattgtgtccggttttgtatgacgtgacacctacgtggctccctttaacttggtcctcgtcccacgtgacattgacgtggcgcttacgtggcaataggatctcagaaaaataataaaaaacatgaaacctacatgtcagctacacaaaaataataagaaaaggagatgcccctgtggtcccacatgtcagccccctctactctcaatcccccctctctctctcccttacagaatggtgagctgcggtgcagcagggggcggtggacggagcggcgcgcgacggccgggcgaggagggaggcggtgcgcagcggccgggcgagaggaggggccgctcgcggcggccgggcgagcagggaggcggcgcacggcagctgggcaaggagggaggcggcgctcgacgactgggcgaggagggaggcggcgtgcggcggctgggcaaggagggaggcggcgctcggcgaccgagcgaggagggaggcgacctcctcctctgcctcttcctcctccggccacctccaccagctgttgacccccgcgcaccgccgactcccgccggctgtcgacccccgctcctctccttccctcccatcggccggcgcgcgctgcctcttctcccgccggccgtcccgacgagctcgcctcctccctcgtagcgctctcgccacgccgcccgccgcccgtcgccgtcgctccgcccgccgctccacgactgtgcgtcggaagaagacgacgacaaggctggcaccccttcggcttcgtgccgccgctctgcctgccgccgccccgttcctctgcccgcctagcgctcccaccgccggccgccaccgccgtagcgccggctgccggacctccccggacggccggacctgccttcacatggaccggcggcgctccagtcgaggggcagcgctgaccacgcccgccgccgtcgccggagctcgcctgctccgccgcccacccgcgccgtcccctgcctgggaaggagagagaggggaaaggaaagaagagagagaagggagagggaagaagagatgagtgaggctgacatgtggggttcacgtgggccccaccattttaaaactatttttgtttgtgcagctgacatgtggggccacgttttttattatttttccgagatataattgccacgcaagcgccacgtcaatgccacgtgggatgaagaccaagtcaaacaagccacgtaggcgccacgtcagccaaaaccgccttcaaaaccgacgagggaccacgtttacccggttttcgtaagttgggggacgggtcatatccggttttgcggtcaagggatgaaaattggactgggcgacaaatagagggacccaatgtgaacttattcctcagaataatcgtactgcagcagctgggccttaaaaagtcgtagtgccggtgtccccatgtccgtccggaaaccacaagcccaacacaaatccttgtccaaagggaaatttttcgagtaataacttacaaatgcactgacaccaccgaaatctgacttattggcatgatcattaacgtgttaattaattatgcatgtatatctatacagtgcaaagcaggttctgtggacagcatatagtatcaaacaatatcatacatgaacttatcacgttattctcacagtgtctattctcctatcctttccttcggatttcagataaacctgcgtggtttccatacacaatgatcaaattttcgagcaggcaggagggagatgtgaagaccacgcatgtgacacgatgatgtttctcttcatttattgggcgtttttttttttgctaatcatttcaatcaaacacgtaccatacaaagcatcacgcgaaaacattaaagcatctaatctagatcaacctaagtagtaaaaatctactagtagtgaatcaccggcgctaggttgcgcttgtacaagcttctcctccggaagaaatccccgaacttccttaggatcgacctcctcttcttctgcttcatggcgtggtccaggtcgccgtactgcccgccgtcgaagtggtcgaactcgtagtcgaagtcgtccatggccgccgcggccgccgccgacttgagctcggcgatgttgctgagcgacgcgaacatccggtccttcctgcccgccatcaccctgttggagtccaggaatgtggcgctgagcttgccatgcatgtcgcccctccacttgtgcagcgacgacaaggggtcggccgccgccgcgagctcgccggcgccatgaccgtgatcggcggccttccgtgctgccgcgagctggccgtcgagctccttggcgcgcccgcgcgcctcggcctcgctggccttgaggctctcgttctcctgacgtagtgcctccatggcgctctccttctccgcgacggcgtcctgcagcttggagttctcgccggtggcgagctcgagcgactcgttcgccgcgttgacctcctcgacggcgcgctccagagcgcgacgcaggctgccgttctcgtcgtcgaccacccggtgcagctcggcgagctcgacgttctcttgcccggccgcgtgggcctcgtcctcggccgcccggacgcgcgcgagaagcaccttctccctggcgcgccacgaaacggcggcctccttccagtccgacgtgaggccgtcgagctgctcggtcgtcgaccacagctccgcctcggcggcgtgcagcgactccctgagccggtcgacctcggcgttggcgtcctccagctcggcctgcgcgtcggacagccacgccttcacctgcttggcctccatggtgacggcggagagcgcggcggtgaggtcgtcggccgccttcctgctcttctcctccgcctgcacggccgcccggagcttggccctcagcccgttgatctcctcgtcgacgccgccgaacatgaggtccatgacgctccactgggcggcggcggctggctcggcggcaggggcgcgtccctgctgctgccgcagcgtggcgacctcgagcttagcctcctcgagagcgatcttcgcctgctccatctccttcgtctgctgtatcagcgactccagcatattcatctccgtcgccttcgccgtcgccacctcccgctccagcagccgcacccggtcgtcggagcacgccgcgccgccgcccaccacttccttgtccacgccaccgtcgctctgccgcaacccatcgacttcttgcagcgtgcacgacgtcttcttctcctccatctccatcacgacgccgccgtaactctgcaccagccagtgcgtcacctgtcaccgctcaccaccgctgccgatcaaacacaagtttcacgcacgatcaggagacgcacctcgggagacgacggcgagaagatggtggcgacggatttgctgcgctcgtggcgagacctcggcgtggacaccggagaactccgcgtcccgcctccccaggacccggatctgcacggcgatcatctcacccagtcagtcagtcagttcggaatgctcgctcgctcgatcgccgagttaaaaaaaaatggcggcagagagacggtttcgcgcgctcacctcggcctggacggcaacatctggtgtcgctcgcgcgcgcgcgcgtcgcttctgctgtcacgtacgcagcgcagcgcggcgcacaggcaatgccagaaaacagcagtaaagcagagcgattttatagcagagggattagaaggtttcagactttcagtgcagtgacgcatcgggattagcaaataacaccaggatagtgtagaataatcgtggcagtagtactggacgagcatggagcaggtgagcgagtgaaagagacagcgtgttcgatctggaccgtcgcgagtgatcccatgcgagtttacgactagtatatctatctgctcgcgatccaatgggaattttgggagtttttcagttgcttccatcgagtcgttagcttaatccgtttgtataggtaggtaatttggatttgatacatatcatgtccaagctagctagccctagatgatgccaaatacaagtgaaagccgccaacgttcgtgcatcaccctgatcaagtagcagtttttgggcggtccagtggcgaagcagtcatcgtatattttatttgtcacggacgttgatgtgtcgggctaccattggcacggccatgacaactcacgagccgaaaaacaatactaccaaatagaggagtatatttttgtcacggtgtgcattgtttcagtatcgaaatggggatgtcatatgaagtgtgactatatataaatccctggctccaatccaattacctagagtcctagagagaccaaatgacgggctaaaagtttggttataattacactgtatgcttttggatagacgtgatactatacgcgtttagaaatggccggtggacctcttttttccccttgcgattttgcttgcttggatggattgttgttggattttagtacagattaactgtttaaggaacttgatctaatgcccactgaataacttttgagtcgtggttgtttctcagataactgcaaacatgggctctgaataatgaacaggtcgccgaagtcgtcagcgaaaagcgaaacgaagcgaggcagttgcatccacgtcagccatttggacttttaaaacgagatggccggtttcatggttgcatcattcctgtaccaagcaagccgcaaacatgatagaccaaagctgattaaagaaagtactcgtaataaacacacccaaactgattaaagaaagtaataagcacgatgtaattaacttgcacaagtagtcaagtactaatatacatccaacaggtccatatctgacagtttttagtggtgggcttattattatccatgtgacccgagaggcatacttaatcagagtgtgagacagccaaattgatctggcgtgtactacttactactcatacgtactaatcggttttcggtctttcatttgcagcaaaaaccgatcaagcgaggtaaaaccatggcgagttttgggcagggaaaactgggcgtgtctgggacgacgtctacgtttacgtacaccggccgtcgtgtgcggatgtttatccggcgcctgttcccaggctcgtgatcaacctcgttaataagcctccgagctctagctagctgccacgacgacgtgagcatattatttttcctgtagagcctcgccctcgcggccgacgacggcggggcacgcgcatcaccgtagtcgtcgatcgcgagagacagcgtcatgagtttcagcgcggacgccgcgcgcgggcgggcggacggcggacggctatgttgcacctatacttcactttcttgccgtatcggtatccgatacgtacccgatacggcgatacgtccggtactctgtcgatacggtatcggaggagtatcagtcattaaacaatgaaaaaaaagaaaaaataaatactaatactcacacgatacttatcagatacttctccaatacctagcagtgtaacctccttgttcaatagcccattaaagacccaatgctatacttatgatatatttataactttaatatacttgatctatttgtaatacaatgctatatttactatattttctgtaacaggcaacaatacatagaatattttttaagataatcttattgctttacccttttgtagttccctatattttatttttaaaaatatttttatatatactcgccgtatcgacatattgatgtttttaaaaaaaatcccgtattgccgtatcaacgtatccgtatcgccgtaccagtatcgtgtatccgtacatcgtaggtggacaggcgatcgatcgaccgatggagctcgacatgcccatatcgacgtgccgtgcgatataggtggaggcggcacgtgcgcacgccacgccacgtaccgcctagaaacctgccgagaaagcgatcgatgtgtgcgcacatcggctcaagcaaatacaactagtgatcgatgtgtgcacacatcggctcaagcaaatacgactagtgatacgactagtgtgactagcggctgggtgtgcatcgtgcatgtgatggacgaggagcgcggtcggcggtggacgaaccggtttgtggcggatcgcttgcaatcatagaactgggctgttggtgcgttggattcgcgggtgcctttttcgcggaagctgcgctaaagggccagaagcctacaaggtggctcggaccgtatgtgtgtccaatatatctgtgttaatcggcttaattctgacagtgacatcgaagcatatgtgtcctctccccagcggtctgaccgctgacactctgtggccgtgaagacgtcttcatcatttctgattaggggccttccatattgaatagtagacggggtgtcatcttgatttcgtattatgagattgcctacatcggcaatccatactctttttaaatggttcttacgattttgggtatgtgcctattggctttctcgtggcactatcattgcagggtgacacattttatagtcggaccagattgtgaggtataacagcgaccacaaggaaagagcgagcaattccactaggagattttgattcagtggtgtttatcaagtactagttccttgactcctagacgaaatatttaggtttagataggtgtaggagccgattcaatgtgggtgcctaccctctccagacctatagagcaccctgcaccccctaaatatttcaccatggatgatagagtagggagtgtatgctaaaaatctatgaatggttggaggttgaaaaaatcgtgaaattagaccagtgaatgcaattggactaggcatacgctattggactttcaacctactcacttagaaaataggccacaggcctacaaccaggggcggagctagaaagaaatggagaggggtgccactcacttgctttactctacattagactgatataagtgcctaaatttggattgagggggtgcatatatggtgaaaatagatgaactataactaaaaaattttcttaaccagattcctaggcacccccacatctcctacctagctccgcccctgcctacaaatagccccccagcccaactacctaattccccaatacccatccccaaatccctggcagccaatgcatcgaggtagtgagctcctgaacccgttcagctacgcaagaggtgagtggcgccggcgagctaatgacttctcttaatccaaggaactagataagcttgtaggacatgttggaatttatgctgaagattataatgtcggtgatcttttgtgttactaggtcaacttaaagacttcatcagccatgttaggagaagttcagaatttcttggatgtacagattttccaaaggttgttgaaataatggttaaatccggaatgcacagatcgtagcgattggtttatcgactcactgagctaacatcgatactgccggtggcataacggcttcagttgagagagtcttttcagccacgtcgcttataaagatggatttgcatatcaaattgggggatgaatggctcaatgatttgatgatatgcgacattgagaaggagatattcatgagcattgataatgaaaaaacaatcataaaacaatttgaagagataaaaaaaacatagtatatgttagtgccctcaaaacaatttactggtatattctctatcctattgtaatgctcagaattattttgaagaattaaagttcttatttggtagttatcactaatttgttttgtctcatacttgcatgaaagataatctgtgccacaagtgaaaaataatcaattgtcttgtgaagttaggatgtatttctctgattccatatgaaacttctttagactacaatgtaatattatgatattataatattgtatgagacatgatgtgcttatgccggtgtttccagtatgtttgacccccaccccacttttttattcctggatacgctagcaatagctgtatttgccttttataaaaggcaaaaaaaaaaagttctttggagtgaatggttcgctgattgatcatggcaatgatggccgatgcatatttttataaggtgttgttggatgttctttcttacagtccatgtgttactatggtgaagaatgaatatgtcgatggtcgatgtattgttgctcaccctgacatgatacctgttatcatgtccttcatttttttcaataattatatattgtgtatattctagttatcaaaaggccagaagtggtcttatattaattgtatatcaacaaaaaaaatttatcaaaaaaataataaacaacgctgtagcccaacgtctaaaactgggtaccaaggtcagaatgtatggtattcgtgagaaaggtagtactccctccagcctgttataagcgcaaccatagcccgtaagttgttcaactttaaacgttcatcttatttaaattttttttatgatttgtatttttattgttattagatgataaaacatgaataacccaagggaaatcagcagagttgctgataaattagctaaagaagttaaaaacattcagtttactactgctgtgatcaactgtcaaaacatctcacatattgcctaccccagtagaaactgtcatgccagaagccttcagtgtgacttcacctcgatcaattgtaagatctcacatgtatggtgttcgttacagtgttgggtgctgatgttgtgtttaatactactgtaacgtgtagaaacctgtatctacactaccgtagaaagctgaatcatgaagacatacacaatgagcatacaacacgatgtaccaacggttaatatctttcatcatttggtatttcgactgcttcggaaacagataccactactttccaggttataaagatccttgtcatgggtaaaagagagttgcataacaggctaacagcgagcggtaaaagatggggagaccaggggaagagagagagagagagagacagaggcaagccgggggaaggtctgttcttcacaggacccttcttcattcatcttctcagtcatctcttcctaccataggcctgcaagatagaaataatgagatcacaatttgcaaacattgtagtttgtaataaaggaattttcagtcacagccgccaaataatatggattcaatctagtcaaaatgatacataactttcggataaggctatataaacatgtaagttaatcaacggatctctttattcctcatgaaaatatccttcccagatttgagttttgcaaatagtatggatttatgtactgtatggtaagccttttctaatttggtccttggaatgcataacctgttgaaaagtaaggatcacctgttacctcctgtgaggtaccagaaaaccatcagacatgattcatccgatcatgtggaatttatctcattcagtatacctacaattaacaacacacgaacaagagcaatataacccatattcctctccaatgtatgatgaataaggacaccaatctctcttagacagatgaaattcttaacatttccaagatgataagaaatttacaaacaaaactttccttccaagtgaaatacccaaatgcattggtgaagagtaaaattaaataaaatgcatgatacttcacaatctttgcacaatgggaaataaaagcatatgcaagaaaaaataagtgccattaataatcattgagatgaaagcatatgtagaggaaaagaaaacataatatttccacaaaaccgttagcttcgcagtatataaagaaaggcgggaagcaccttaaaacagaggacaagtgggctgtgatgtgctcctcgtagtgcggttgcggaaaagagacaaaacccagatttgatacttggaataggtaaggttgtttttgttcaaaaacaaagacactaagccgctaagcgacaacagagactaattggagaaagatcacattactgccttactggtcagcagaaggattacacaacaaatacgcgaatctttatcagtactcgccaacaggtgaacgcccaataaattcaagacaagtgccatactgccatgcacgacatcatcttttctgctagtaggaagtttcatacgtacacaaaccctaactattggtagtatatatactagcacattagagaaaatatgtgccctgaaccaaaaatgaacttaatatgggacagagggagtatttatcacctaattaatagaacacaaaacagatgggcatgccattgtcgaggacaaacccacaaaaatggcagcaaaggttgaaagaccttccatacagcatattacgaaagttgcactcataaagttagttatactcccttttccggcctaacctatacaagagcatgaatactttgaaagtcccatattcaagaaggaaaaggcaaaagattaagtatttgaacctctattcacacaggatttaaaacaaccagaggaatgaaccagctaaacaaatacaaaatttcccccacccactaagtttagttctctacctacaaccttgcatctagctaggttcattcaggcctcgctactataaattaaggtgactaacaatctttccatgaacatctaacatactcaaattaagttgcatagaagaagatgatttgtctatcaagtcgacacatccagtacatcatgatttcagtgattagcagaacaatgtagcaattcgtcttttcattttccttctttctgcctttgaaagggtttctatcagctaattagtcctatcatcagtatctcaaccaaatttccttaaatatatgcaacaaaatggcaggaagataaagaagctcttacccaaattgctcttgctgcactgctaatgtccagcttctgacggcgcagaccaattgggggcaacagcgccacctctgagctcctccatccactcctggaagaacttcggatcaaaaccaccctcctcatcctcctctcgatcacaattcgcttcaactcctccttcctccatcatagaaatcgatgcctctgcagccgctgtcgccacacccttgttcggctcggcgatcgccggcgtgtggccttcgaagagagcgagatggccgaacagcttgtccttgcgggagaaggtggtgccgcaggagcagcgccactgcgcctcctcgccgcagtggcggaggtggctccggaggtcggcgaggacggcgaagcgcttcttgccgccgcagcgctcgcaggcgtagagcttggggcagtggctccgccggaagtggttgcgcgcgcacacggccgacttgagcggccggaagcggcggtgcgcgcggttccggttgcagccggcgtaggggcacgagaaccgcacctcccggccggcaggcggcttcggctggccgggcctggagagcgcgtccagggtcttgaagcggtcgccgtgggcgcgcatgtgcatccggaggttggcgtcgcggcggaaccccttgccgcagatgtcgcagaagtggacgtgctccgcgagaagctcggaggcgtcgagctcgacgacgtcgtagtcgccgtcgcccttggctgcttcttgcgggggttcctgaggcacggagaccaccacgggggggagctcctggacggtagtagccggaggcggaggtggagccgggagggaggcgacggtggaagagaggagggaggcggcgttgaggacgacgaggtgggcagcggaggagatctcggaggagacggagtggatgtcggaggaagagaggggcccggattctccggatatagatgcggcgatgcggcggcggacggcggccatgcggtcgccgagagcaaccaaccggaggagcgcgtcgcgggcatccccgtctcctcctccggctccggcgccgccggccccgccgacgagggcgccagagggatcccctacttccatggccagcgtcggcgccgtggcagccgttggtggcgcgacggagccgccgccaccgccgccggcgagtaggtgggtggtggacttcatttcccaaccttttttttttctaacttcgctttggcatcacgacgcgtttgacggctttgaggtttgtgataccttttgcgcgcaggtccctgcaattggtaaattttgcaagtatttccattgccccctttttttttcttttcttttccaaaggatgacgctacataatgtgaataaataaagtggcttttcagttataccattttgcttttatgttgcacatttgcacatccagttatggctataacttttttccctcatactttttcgaaaaggaaatatcataaagacacatctctccatatactttcatgatatgatattattcgcagcggagttctatctacatgaagaaattagacattgtgccattgtcaaaactaggtttcttctaaatgccactccgcaaaagggatttgataaaatgccattccacaaaatgaatttgataaaatgccacaccacaaaagggaatcgataaaatgccatcctaaacccgtggctacacgctagaatgctatatgggaccaaattaccctctcctttcttgcctgggcatgtaactgttgggtcagtgtgtgacatggtactcatggcagcagcggcggtgaggacaccagcggcaacgaggagcgaagttgttcctcaggatgaacttccctagggtggcagtcaacaacgaggtctccggcggtggaggcaccatcgaggatgatctctctcgctagtacaaccgcctatgcgagagctctgtttccccagttgtcgcgactcctcttcactccaactccggctccttccctgcatggtgttgctccattagctgcctccatggctaccgagagctttgttgccgaccaatcgtcgccttcagcaacctcctcgaggagagcttgagatccaccgccgtgcttcgccttgaaccaccgcctccatagaggcatggatctcccctccccttcttgtcatcgagcagtactgtgagggagagaggtaggccaaccagtagctgagtcttttgcttgtcggcgttggcccttgtgctcgagcttcgccactgcacaggagctccccttgtccgcgctcgcactcgaaggcctcactaccagcccctttgctggtctcagtcagttgcgagcccctactacaacaatttgagaagatgagacgagagcgatgtccaatggccaaccatcaatgacggcgaggggtaatcggagttgaaatagaagatagggatggaggaatccaagggcaatttggtcccatatagcaatctagcgtgaagccacgggttgaggatagcatcttatcgaatcccttttgcggagtggcatttcgttgaaacccaattttggtaatggcacaatgtctaatttctcatctacgtgtctattattccggaaaagctaattcacgcgtgcgcgttggcggcgcacgttttaggcccatgcacagccatacgttatgttttcttgtgacttttcctttttttttttagccgacaacacgcgcacatgtcctggactcggagagaaaaaatcgtgattaacttaacaattacgtaattaattttcaataatcacaatcttaattaatctttcctttttttctgcctaagattgttttctttttcactataagcttaaaaatatagacataaaatttgaaagtatccaattaaatttaaaacttactataaaaaataaaactttcaactcgaaatttgaaaattttaaactcaaattttgaaactttcaactcagtttgtgaagacttttaactcaaaatttgaaaacttttaactcgatttttgaaaactttaagctcgaaatgaaaactttcaactcaaattttgaatactttcaagtcgaatttgaaaactttcaacttacaatttaaacttttaagctatttttttaaaaaaaatcaactcaaatttttaaaactttcaactcatatattcaaaacttttcaatttattctgattataaaaactataattagcacaatcattttacactatcattagcgctaatgatgcacgagtgtactactatctcggctatgctagttggctaacccaacgctagttaatcaaccagcgcatatgcgcgtactagcaacccctattattcgacttctatttgatacacattatatatatatatatatttatttatttcagataaacatacacaaatcatatactattttctaaaattacaagctggtttggaaggtttcacgttctgggccaggatgtaattctgcgtacgacggttggggctttcaggaaagaaagaataaagcgtaaagagcaagggtggaatggcaaaagaggtaggcagatcggataggagttttgggggcgcggtccgcggtgcggtgcccagcggtggagtgcgcaagcggggccgtcgtgatcaaagtcaaagttgtgagctcctctcctctcgtcgtcgctcgcacgcacgcacgcacgcacgcacgcgacgccacgccaccacccgcctttccccacccaccaactcctctcgctgacactcctttccccaccggccaccgcgacacgacacggcacggcacgggctcacgcgtcagcgtcagcctcagcggggcgacggctcacgaggcaggcagcggcggtgcgtgcgtcgcgaggggatgggttgtgggtgtgtgcgtacaagtgtggggcattctcaattcgtcgtgcgcgggcggtcaagtgggcggctttgcgaagcagtcgcacagcaaacaggagtatggtgaggtgaggactgatgaggagcaaaagttccgttggattgcggttggggccaccctcttctcctccaatgggaataattcgatagaaaatgtaggcgaggtcgacgtccgtcagcccgtggatggtgattaggaggcaaccaggactagagaacagtttaatcatgtgtaaagtgaattatctaaaaaaatgtgttaagtgaatgcccaacaacatactgtagtactactagtagcgaccgtcgtgagaggaatcatcaagctggtactgctgcaatcgtatcgtagtgggaagaataacaagtgtactatgggcctctttagactccctggtaagttctttcatcttgccatatcctgccatatcgaatgtttggatatatgtatggagtattaaatatagacaaaaaaaactaattacacggattgggtgtaaattgcgagacgaatcttttaagccctaattgctccatgatttaataatgtggtgctatagtaaacatttgctaataacggattaattaggtttaataaattcgtctcgcagtttacgagcggattctgtaatttgttttgttattagactacatttaatatttcaaatgtgtgtccgtatatccgatgtgacatcgcaaaaattttcacccctggatctaaacacatcctatactattgggtatgcttattgctcggatcatttgttattgaaaacagacaaaaagacatattaacatgatagaaaatgtatgcataaaatggtggattgaaaaatatagaaaaaatatatgagatagcttgtgtggatataggaattcaattttgaggctgttattatacagaattccgttcggacaggatgacagtaagtaggttgatatttaccgataccagatgcggtacccctatcagtaccagtttgatactcatcgatattaggccgaaaaccatcggtaccaagcctccttgcctacgccgaaggcccgcgtagcatcggtatacgagacatcgtggtcgcattgcagagaatctagcccatcgggttagtggagtcgagcagcggggactcggatggtcaaacctcatagtgtccaatcttcattatttgccgaagaggtttagcctctaggtggaagtagtggcttgtatacgccatcaggcggatcagccgctgcaacgagggtgtcgtacgagatagatgccgcagaggtccgacctaaggaggtggttgacatggatacattttgatcgctagtgtagtttggtgctgacaagaactagtctcgactagagctgccatgggggctcttcactggatggcaaggtcagggggtggcagcgatggtcggagtgagagaaagggaatggtggcaaaagtgacgccgcaaggagaggaggccaagctaacagggggagcataccacatggaatacggggtgggatctagtcccctagcatttctgaaagacagtttccaagaaaatataaaagataatcggtgttgcatgagtatcatgtagattcgcgtagtttggatgctcccgacaaaaatctcaaattgtctcaactcaatttaataaaaaaataaagctaaaataggtcgctctcttctaggggtggatatcgagctagcttagctcagctctgctcgacctagctcgttaggataacaagctggttcagctcagcttattatccaaacgagctaaaaggcaggctttggcttggctcgtgtaccagctcgagctagctcgtttagcttgcgagctagagccagaattaaaaaaagagcagatgcaatatgtcagcccctagccttaatgttgaataaattaagattggaaagaaaatcaagaaatcctcaaacgtttggtatgattaatacatcaagcatgctaatgatcaattattacaaaccatgtgaaaccgagtggccagaatgctggattaaaccagtattacaaaaatccaagaaacattccagatctaaaaaaggaaaatgagggttgacaaaacatgtgagaaataatcatcttgaaagaaaggatggacatatggcatggttgatctcattcacccgcttgcttcttcggtgattcggtcgatgaatcgagcaagaggaccacatggctaggggcatggtggcgccggccagacctcataggagcggctaactccatggcaacagaccttgttatccaccccaccacacctactcagatgcccggacaggaagaagagggatggtaggaggtggatgccggtagcgcggggtgggagccagcaaccggcggagacctagggtcttgggacggcgtgttgctgctaacagcaagagagaaaacaagaggggagggagtgaaagtgcatctaacctcataagtgagttttggtgattaatgacaaaacaagtaagggactaatatgtttattgagataaatacagataattagtcccagggtgcttaggtgtgctgggaaatcccccaacaacaaatacaaagcggcaagaggactcggagatttatttaaatttctttttatattttgatcctcaacggagagtaggatccctatgatccaaacttcaggataaaatatttgtctccctcttgttttaatctcccttgcttgtgtggtgttctccttgtgattattgattattgtcttctgctgctactctatggtcctgcatattactctaacttctaagtatcattatattaccttttgcttagtgtgatatgctggtcagaggctaagtcttaccttcccggaagttccgggcagcattttttgcttagcggaaaagctgtcaggaagttccgagtccgagccattttgccaagaagttatggtcctgttgaatttaattgttgcgattcaagaaactttcacaaacacctattcaacccccaaccctatagacgacatctacaagcttttagagaggagccgtagtagatcgaggttcgagactagggaacgggcgaacagccggacaagagatcgaactccatccagggtagataggataagcattttgcttgcttttttcttatcgggcttcgcacatggaccgctcggttgctaacgttgggctcgcaagctagcttgagctagctcgttataagtaacaagctaaaacatcatcttagctcattacaaaaatataacgatttgagccaagcaagctaataagctatgagcttttcgtccagccctattctcttctcacgaggaggatcataccatcccgcatacccgctgcagcaatgatgttagctttccgattcaataaaccacggaatcttacagaagaataaagagtagaattccttatttatttgttctcaaattatgctctcgtggattttcctgtcttcatttgggttgtcttggactttggtaaaagctcttattgattgagcttcatcttataagctgtacaaatatgagggagaatttactatttgccactctctcaaaatgccagtgcccaaatgctactctcccaaaatttcattcccaaatgccacccgggcccacatgtcagcctcactcatcattgggtcccgcatcacttttgtttgaatggagagtgaggctgacatgtgggcccgggtggcatttgggaatgaaattttgggagagtggcatttgggcactggcattttgagagagtggcaaatagtaaattctcccacaaatatgaacaagaaataatcaggattgacagaatacttgcaataattttttttaagggaagtttcgatttttcagcatctaaccccacaaccctaccattggaccagctagcagttttgaccacatgactacagtttgtgtcctagttacataaacaatatatatagttataatacaattataatgtattacactataattacactgtatatacatttgaactgtttttcattaaatatctgttggaagctgtataacttaccggtaaaacttttatatttatatgacgtgtgatttgaaagccaaggctagattattctatttttgctagaacaaaagaaatcctggaaagttcggttcccaaccatttgatttcttcctcttttgaaccaactattcttttttttagaacattgaaccaactattcggataattttattcaattacggtgggaactgtagtggtcctctttgggctctctttgcgcgcaaatataggccgtaacgtggttgatcgaatttgatggttcatagggtctctttaggtctcctgtaaattttttcaccatgtcacatagaatatatttgaacacatacataaagtaataaatataaataaaaaaagattgtgtataaatcacgagacgaatcttttaagcctgattgatccatgatttaacaatgtggtgctacagtaaacatttactaatgacagattaattaggcttaataaatttgtctcgcagtttactggcagaatctgtaatttgttttgttattagtctacatttaatactttaaatgtatatacatgtattcgaggtgacatgccaaacttttataaccaacgatctaaaacgcccccatactagtacatactcctagctgccggatacgagatcaactgggcgtccacatgtgaaggtgcagccgccgatgtccaccggccaatcggccatctcgagatcccaactggcgctgctgctgcgtgaacctctctcatgatgttgccgctatgggttatcacgatccactcattaggcggcccaactaatttcttccagcaagcgcgttcgtgacaatccccgttgtggcccatgtcactgtctcgcggactggagtactggacgtcacgtcacgtcccggcctaaattactggtttgggccgacacgtcttctgttcattcagggattcggcggtagccaacatagattaagttcgctcttgagatcccttaacttatcaactaatacgatattcatccttcaaccgatattcgtccttcaaccagaattccaaacaatgagacactgctagagattgggagggtggtggaggtagagggccaaatcctttcagcaagaagcccaattgggtcatcgtcgacttcgctcgcgactggctcccgcccatcgcaaatgagcaccaggttccatgcgccttcttctccgtcttctccacgaagatgctcgtgttcgtcggcccaaaggcagcacgcacggagaaggagaagggcggtggctgtcggccagcgaggaaaagggcagggagcggcagccattggacggggaggtcggcaagcgtgcatggagagggaggaggcgaggaggtcgacgagcacgcgtggagagggagaaggcggggagaccggcgagcatgcacagagagggagggagcggggaggccctcagcccgttgatccccatgtcccattggcgtcgactccccgcgtcttcgttcgccacaccgtcagtagtccccatcccgacaacagcgacgtcgtcgacgtctgtcctgccggtcaacttcctgttgctgctcgaatcgattcttccgggtgcacctaccatggtgtggccgcaatgccgcgttacgtcgccgtggaaagcaccagagaaaaagtcatggatgcatctctggggaaggtaaggcttgtgcctcaaggaggcggccacgtcaaaattgacaaattccacgtcgcgtcgccgccgccaatgagtacgtctcactaaagagcagctcagtaacatcccccccccagcacgctcgcgttggtaaggtgggaacggaggtccctagacctccccagtggtcgagctcggtgacgtcgccgccgttgcctagctcccgccgaacaccggccgccacccagctgtagacctagacagagatggggaatagggggagagggtgagagaggaggaagatgacgttgtatcactgacatgtgggccccacatgggtcccacctttatttaattattttttgttttacctgacatgtgggcctcataatttttatttttttatcaaactgtcacgcaaacgccatgtcaccaccacgtaggacgaaaaccttgttaaatcagccatgtaggtgccacgtaaatcaaaatcacttagggacctcgtctgtattggttttgatagtttagtgatccgttgtatctggtaatggtattgcggtacaaggacgaaaatctaccacggtgtaaagttaaatgacctgaaatgaacttatgcgtagccaacatttatgcaatggaatcgtgttggtgattctctggagcccactgccgggcacggagcagtggcacgcggcgaccggatggatattttgccggttggtgcggccgcgaggacttcgctcattcgctggtggaggcgcgtggagttggccagcggggtgggtgcaaatcaccaaacaagtccgaacgcgcgagtttggagttgctgatcatgctgcgcgccatggccatgcaggagcacccggcggcggccgcatcggaatttttcacccactcgatccaccgccgcctgacgcttgtatgctcttccccgacaagaagaccagaattcgtttggatcaattcaaccaatccctcttatcaatttagtttcacctcatccggttgatctgatcgatcacgtcgtttaactcaggacgccaatggggataggtaggtgcctgcttaattgaccagaccagagagtgccagagtggcacgggaactcgttatcaccgatttgctttagtcaattattactcaccgaatcaccgttgttagggccaaatactatcacactgtaggtcaccatctggagcatgcattgccataggattctactactagtagcaggcacacaatcaacgcaagtacgcaacgacaggccacaactatcgttacccgtcactgccgtcgctgtcccggccgaagaacagatcagaagctgctagtaaagctttatgccggcacccacgcgaaagcccacgggggcgggcatccgttcggccggggccggggcagcagctgcgcaggggcgctctgccccggattcccttcacacgcgcatccgcgcgcgaggccgcaccaccggcgcgtggctcggcaggtggaagggaattcgggctagctgagcggtggccccgcgcactggtcacagtctcacagacgcacgcccgccggagtggcgcatccttcgttcgtgccacagtcgaggcgtccaaattgaccgtggcgccccgccccagtccagctcaagcaaactttccatcagtcgccgcatcatcacgtggcctggttttgtcaccttcttggctccttctatgccgatctgcccggctggatagtcagcttctcgctgatgccacatcgttgagacgttgagctggtccataccgttacagttaggttgtatttagtttacgttcattaataacaaaacaaattacatattccgcatataagctacgggacgaatttattaaacctaattaacccatcattagcaaatatttactgtagcatcatattgttaaatcatggcgtaattagactcaaaagattcgtctcgcaatttacatgcaaactgtgcaattgattttttttcccacatttaatactctatgcatgtgttcaaatatttgatgtgacgtttttggctaaaattttttggatctaaaccaggcctaagagtacaataagatgggcacggggtgccatattttacatcaaggagagtgtgccgtgtgtgtgacccatcttttcgctatatttatgtttaatttgttagctaaaatctaaatttttaaccttaaatttaaagttgattttagaaattttttgtcgtagtttagatggttataaaatactccatacatccagattcacagctaaaaatgcttacattttgggaccgagggttattttctacttgtaaatataccgtttcgttttttctcgagtataccgaacgatgggactgaccgatctggcctaattaattgcgggaacaacctttttaatgcaggggctgagttggggctagctagctaattaagataagccctttaatttgttctctcagtgattgggaacagcattaggaaacagtaaactgctactaaaatttcctgagcatgatgggaccggtatgtgacatggccagtacaatgatcatataatccgctgagatcgatcgctggaggttctgggtctcaggtcactcagccgaaacagtggaggaatcgattcctcaggataaccccgatcggcccggaacgaaaagggttcacgccctcacgactttccatcaggaattcaggatagcaccttttcggcacacgtcgtattcttaccagttgaaatctaagcttaggcagttgttccagttccagtaggagctccactgtggacttcggacttcaagtgcggatgcggatcccgtgagaagtgaagtgtttgccgtcagataatgctccaaatatgtaatactaacacactatttatggaaaatgaaggatacaatgcatacaatcattttagtgttaaccacaacaccatgccatgccggtagacgttgacagggatcgacgattatttgaacctagctgattaccgtgcaaagctgctcggcctgcatgtcgaagaaattaaacagcaaaaacaaggaaatgaacggcaacaacaaatgggtggttgagaggcaaacaccagctgctactgtggttctaatgcgtgcagctaagctcgcaccacaccacacaaccctgtgtacgagacatcattcagtggaggtcagggaaagaacagatcgcgacactcgggttgatcagaatggaccaaaacaaagttgcagataataagaggcaaacccacgtgttggttaggtacatcttttggcttttgtaccaggggcttatcgtcgtccttacatctgggattaatttatttccaaatttagaaactagatgcccttaaattatttctttgatgtgggagtatttttccatccagggttcatttcttaattaatgcacggaattaaatagctgtgtctatccagagtatagatgtcggaagctcacttccatttgtccaaagaaaataccatattctttcttctttgaacttgtcataggtggaaaagcatttcaacttctttgttagctataagaaagagattatgaaaattctctatttctccttaaagtcgaccacctctcaaacttgcccctctaaagttgttttttttatatgccactttgtaagtaatatttatccaatgtttacccctaccactcttctaaccatagtgtccattttaccctttttcttcctctcaacctttttctcctttctttgccaaactttttcctccattattttcttcattactccctccatcccataatataaggcatacatgcaaacatgcaattaattatgatattttctccattaaattattacttttttaaatcctccactcttatgctatctaatcctattggatgcatgcattatatttattaggatgatccaaactataagatgataataattatttcttgatttttgggttaagaatggttgtgccttatattttagaatggagaaagtaattagcatcctgacattggtctcctctttccactcaaccatggccctcgtcctcccctttaatcaccctttccttgacaggtgcctactccctcctcaaatggcggtgaccctcctatttagctcgccctatttcatcttggcctaatactaacccttacattattaaaaaaggaaaaacgctggataagagagaagagctctcatatagaaaaatatcaagagaagtaaggtttaaatttgggtcatctagcccactacttgtgctagtcagaaagaacccaaaaatttctcaccctctcaccattcattgacaattctctttaaccctctttatcacacgacatcgatatatacaaaacataacgagagatttagaaacaatcatagtgcgataagacattgggtaataggaacatgaagacaaagtgaagtaagaacaacaaaactgtttaaaatcattatcctgtgctattgaatagcacaatactgataaaaactgcattcgcagcgggtgaaagagagaaaatttgtttcgttttccgctcgcacacgcttcccaaactactaaacagtgtgttttttctaaaaaaatttctatatgaaatttgcttttaaaaatcatattaatccatttttaaagtttaaaatagttaatactcaattaattatatgctaatgacttacctcattttgcatatcttctcaatcttctcttttcttctcctcttaaactcagagcgcgacaaataaaagagaaagctaggttaatatggaagtgacaaataaaagatactacatagtgttccttcctttttattgttttggttttcttttacggaattatatatccttttcaaatcacacatggtagcgccttctagaattcgatggatcagtcaccaagtgcatcgatgtaattgtcttgttggcagcaaatcaaccatcctgacggcgatggagatcgtgaaattgaaaaggaatattagcgtacgtacttagtgccgatcatttagcgtttctatcgaaagtgcggctgatcgagttcaaacatgtggtaaaccttttttcatgacaaacaaagcaataaattaaaataccacaatgtgggaggaaaagctttcttcagtgtttctcgtggtgagttaattgtgatgtttactttcgtggcgagttaactgtgacaaatgacaaggcaatgaccaatagattaacaaccaaattacaaaaatccaaccgaaaaatgacagtgacatagctaataaacgcaggcagcatgtctaattaattatccaggtggcgaactggggatcgcacattgctagctttatttctgtgtcttccgcctttttatttttcgaagagccttgacacccgtcagagttgtgttgtatttactgcttctatagtgctcaatttcaacacacaaaagtttttgcataatcaggaaaaataacatttctatatctatataggagaccaactaactgttatattttataatatatttcaagtttatcaaaatttaactaatcgtctaatcctgagatgatgtgatactctgaaatgtggatactgttttggaaaattattaaaagataaatttatacagcgccaaacggatctcctgtcgattcatacaccagtgtaattaatcaaagctgcgcattgtaatctattggatttgactcagaaaccttaccctttcatcaatggaatcgcattatagcaactaaagctagaggtgcatatatatatatatatatatatatatatatatatatatatatatatatatatatataatataatgccccctcacaagtaataattaaaatatttcaattaatctgcccaggttgtcggttgaaaggcaaaccttccgaatcgactgaatctgacttgctgcttaacgaactgtttaaccacatggattagtgtgataacatgggctaataagtggcgatgtactataacgcacccattctctggtctggctgattacgttgtgtaaacaaacactatttttttctaatatattgacgtgcaaatcttttgcgcgttcgtgaaaagaaaataacacacccattctcgacaggatgagcgtgagtgcagctgcgacctacccctatgcttcaatttcttttttgacagttgcataggtcccttttatctttctgaataaaatgcactgctactagttactactattaattattgctaatactttccaatacataggtgatgaagcaagcaccttggcagtgtggaacctatatgtatgtattttatttcttgctgggcaataatgttcactagtggcatgtatagcaggttttttctataatcttggatggccgttaaatggtggaattgtacatatacatgcaactgcatatggattaggaaaaagttcaaatatcctctaaactttagatgaagtccgtctagtaccttgaactttaaaaccggacattcaaccccctgaactttgacataccatccatattacctctaaggtggttttggagaatggttttgcatattttggaagcttaaacaaacaattttgaataactaatataacatatttacatatcatcagttataagtcattaatttattcttacacattgatatcatactattatcatgttgatatttatttgtgagtgagagtaaataaagagcaaaaagaagtatttaaatcaaaattttaatatgtatgtctaaagcgtataacacgtgatcaaactcatctaattatatataaattagataaaaaccattatgcaaaaccatcttagtgggttatataaattgtattgtaaagtttataaattgtattgtaaagtttaggggtggaatgtccggttttaaagttcaggttgctagatggacttccatctaaagtttaggcggttatttggattttttagtcttttttttcgaacgattaaggcctcctttaatccttataaaagtaaaaagatagaaaggctcttaatgttcttctaaagtaaagtgctaagttgtgcttattttttaagttcatgtgaacttcgacgttgaagttttaattgtagttttttttcaaaacgaaattaaccaaacaaattcaaatgttgtttatttcacacttgtttactgatagagttcaagttacccgatagaattcaagttttactatccacaagcattacatacacatggactcttttcaataggaatttagttatgttagggatttgctgatgtctgtctctttaagcactcgcaagtatgcatatgtgacgtgtgtacgtggtggtgtatatgcgtgtgcagcttccgtataatcagaaaaaagatataaatggagaatagtcgacattgttaagttcgtgggacttgacaagaccactgtagattagtcagacatgtaccaagacttgtagaaatactctctccgtacatacgtaggtttatgtcgatatttgaacattcgtattatttaaatttttttattgtgattaacatttttgttgttattagatgataaaacatgaataatactttatgcatgacttttttattttttcatgaatttttaaaataagacggacggttaaacattggacacgaaacctacgtctgcacttaaaatgaaacggatagagtaataaacacgacacatagatgtgacccagcagaatataacatggttagaattgtacaacttagtaccattctacaatttaaaccacagagacgaatgtctggactaggcatgcaataagcataagctatgatttcgcttcaccgtatcaggtgaagaggcctcagctcaccgaccccacctgtcagtggccaaagctggagcccctcaagaatctatccatcaatcctgatttctttttcccactgagagaaaaacaaaaggagggaatattgtggggagagaagaaaggccaagaggagagggaaggggggggggggggcatgagataaatggccaataggaaaagttgagaacaaatccaaaccaaccaatcccaatatccacataccacctctccattggaccacagtttctctctccccacaaccaaaccaaaactaagaaacccctgctgctctctgcaagaactccatcaaattccccagccaaaaacactcagataattttttttattagaaaaaaagaaaggagattagccagccagtctgctgctccatctcagtgctcacgcactcactctgaggagtgaaatccaatccagcccactccggagttcctggaaaatcctcgcgaagtccaagaaaaaaaatattaccactgccatttcttggtttcttgatagcttctcctagctgctgccgcccaatcatccgagagagcgagcaagtaagaaagattgattgattgcttgattgggagtgtcctttgggcgagctgtggtgggatttagcggcatgtcagcgtcgccgtcgtcgatgagcggcgccggcgccggcgaggcgggggtgcggacggtggtgtggttcaggcgggacctgcgcgtggaggacaacccggcgctggcggcggcggcgcgggcggccggggaggtggtgccggtgtacgtgtgggcgccggaggaggacgggccgtactacccggggcgggtgtcccggtggtggctcagccagagcctcaagcacctggacgcctcgctccggcggctcggcgccagcaggctcgtcacccgccgctccgccgacgccgtcgtcgcgctcatcgagctcgtccgcagcatcggcgccacgcatctcttcttcaaccacctctacggttcgattcctatatcttcttctcgcactgcgacctcttcttggtcaattcttccttttttttttaggctctgctattatgattcagacttcagcttagagttccagttaaatttgttcgatatttttccttccctcttctcgtttaacaggatccattgatccagaattccagataggtactatatctcacaaagggaaaaaaaaagagagactaggctaagcttccacgaacagcatcttgtgtgtctaccatttatggatatttcgcaccttaacacccttactcttcacgtcaaagagctccaagtatggagagcatctaccttagactttcccatcaaacactccctgaacactcggtcaccgtctccctctttaattcccaaaagttcatgcagccaccaacctcctcacctcctcatagcctatccaagaactccattaaatttagcagttggccaaggattcaggaatggtgtgtgtgtgctctggtttactgttttagcaacaagaagaatggttaattagttaagtgtcctggtgagtggcttatcgtcagagggatgacgcgaatggccaggcgcagctgaccgatcgctgtcttttggtgtgcagacccgctgtcgctggtgagggaccaccgggtgaaggcgctgctgacggccgagggcatcgccgtgcagtcgttcaacgccgacctgctgtacgagccatgggaggtggtcgacgacgacggctgcccgttcaccatgttcgcgccgttctgggacaggtgcctgtgcatgcccgacccggcggcgccgctgctgccgcccaagaggatcgcgcccggcgagctgccggcgaggaggtgcccctccgacgagctggtgttcgaggacgagtccgagcgggggagcaacgcgctgctggcgagggcgtggtcgcccgggtggcagaacgccgacaaggcgctggccgcgttcctcaacgggccactcatggactactcggtgaaccggaagaaggccgacagcgccagcacgtcactgctgtcgccgtacctgcacttcggcgagctcagcgtacgcaaggtgttccaccaggtgaggatgaagcagctcatgtggagcaacgaggggaaccacgccggcgacgagagctgcgtcctcttcctccggtccatcggcctcagggagtactcgaggtacctcacgttcaaccacccgtgcagcctggagaagccactcctggcgcacctcaggttcttcccctgggtggtcgacgaggtgtacttcaaggtgtggaggcaggggaggacagggtaccctctcgtcgacgccgggatgcgcgagctctgggccaccggctggctgcacgaccggatacgcgtcgtcgtctccagcttcttcgtcaaggtgctccagcttccatggcgctgggggatgaagtacttctgggacaccctgctcgacgccgacctcgagagcgacgcgctcggctggcagtacatctccggctctctccccgatggccgtgagctcgaccgcatcgacaaccctcaggtacccaacttctgttctcctccatgagatgggaccatctttgttgccattaccatattgatctgatgcattggtgttgtgtttcgcagcttgaaggatacaagtttgatccgcacggggagtatgtccggcgatggctgccggagctggcaaggctgccgacggagtggatacaccacccatgggacgcaccggagtcggtgctccaggctgcagggattgagctaggctccaactatcctctccccatcgtggagctggacgcggcgaagaccaggctgcaggatgcactgtcagagatgtgggagctcgaggccgcgtcacgcgcagcgatggagaacggaatggaggagggcctcggcgactcctccgacgtgccgccgatcgccttcccaccggagctgcagatggaagttgaccgagcaccggcccagcctactgttcacggaccgacaacggctggccggcgacgagaggatcagatggttcccagcatgacctcctcgctggtcagagctgaaacagaactttcagcggattttgacaacagcatggacagtaggccggaggtgccgtcgcaggtgctcttccagcctcggatggaaagggaagaaacagtggacggcggcggtggcggcggaatggtcggcaggagcaacggcggcggccaccaaggccaacaccagcagcaacagcacaactttcagactacaattcaccgggcacggggcgttgcgccgtctacgtcagaggcatcaagcaactggactgggagagaaggcggcgtggtgcccgtctggtcgcctccggcagcgtcaggcccctcagatcactacgctgccgatgaagctgacattaccagtagaagttatttggacaggcatccacagtcgcatacgttgatgaactggagtcagctctcgcagtcattgtgagttcacacgcacggtaactcattgttcccagcaaactgcgtcagtattacattgaaaaatcacagcttacagagtaattgtctcagctggttattaaaagggttgaaatttaatttcaagtgcagtatctgaaatgaagcattctatacgcttactaatgctcccatttattttatgcatctgaatgtaggacaacaggctgggaagtggaaaattaatgctgattgtcagaattaatcattaggaaggtcgacattgagaagaattcatatgtaaattatcaccttttgtttgtctatagccttggtgtgcatgaatcaagtgatgaagcttccttgatgcaataatgattatgtaaagctagttttacagaacatttgtggtataggtttgctagttgtcaaaaggatatgtactatttgttagataagaggttattctagcattatgtcttagacttgtacattctccctttggttattgtaatcttggtggaatagtcatcacagagatctcagttagactcagttcagtagtgcatacctggcatggaagtggattcaggaaataatagcagtgccatgatggtagaaataatctgatggcctgaaagattaaaggggcattagttagttaagaaacagttcagtagtgcatacctggtatggaagtggattcaggaaataatagcagtgccatgatggtagaaataatctgatggtcttaaagattaaaggggcattagttagttaagaaacagttcagtagtgcatacctggtatggaagtggattcaggaaataatagcagtaccatgatggtagaaataatctgatggcctgaaagattaaaaaggcactagttagttaagaacaaaaaaaagcttcagagatttatcagaggcaacacagatgatacagtaaccagataacacgaactgatcagtacttaaaattcttatcatcgacttaccatggagtgtgatagtgagattgagcggatgtattggggtcaagagagatgattaataagtaaccaatcatatgaataaatcacagtgccactatcttcattagctaagacatcgtgaacacatgctactttgctctggcttctggcagtgtgagaaacgtagcatgaaaatgacaagcaactgtttgatttctgatgaggcattacaaggcaagatggacaacaagatagtgtaaatttcaacgaaaaggattagtttgattttcaatgaagatcatgcaacatggaatgcatgatgtgatgtttgattgtgacagatttaatcttgatataaaggtacagaatatcatctgaaagatacattcagttcccaagttgttcagatatataacatatatagctatacgcataccacttgctaatgtaaaagaagaaaatcaagtcaatggaaaatacaactaatatcaaactgactgccggaataaactccagccatatgttttgtgaacatgtgatccatttaatatagagatcattagatgaatgatacatagcttcatgaagagacactcttcaaggtcatatatggcccattcaaggcgcatccaactttcgtgggatcaaaatgaggttagcataatgtatttatgttgtgctgatgctaaataattcccttctcttctgagcaagcttatcagtctttcttctttctatcaacatatggatacttctggtaaataaatatgcttgtcatgacaagtggtaatgctatcaggcaatagagtgatggaggctttccgtcaaatataaattgtagtagtgcagttacaaggagagctgacactatcacaaaaccctgaataagcaaaacaggacagttcttaggtaaaaatgaatgagagattttcattttgtaaaagttcaggcacttgcctttctaacacctcctgcatatgttgtgaccagaccaacaagaattccaccaacagcattcattaatactggcacctgaataagacagtcaacatcaaaggcctacaaatcagtgatagttcacgatcaaacctgtttaagttgcttcaaacttaaaccaagaatacaactttctttcttattatccatgcatcttcttgaagacaaaccatgcgtattggataaattagagatgtattacgtagttaaatcaagacttagttgtgttacagagggaatcaaaacacatagtttagttcttgcagatcaatggcctacttctaaacactataagggcatgatcccagcaaaagttacaccatgatgataataaaagcacaccatcttcagatatgaatgtaaaaaaaacaaaggtctggattctactacatgcctatatcgattaaatgcagtgacaaaaggtatacagttatctggagcatatgtgctaaactgacagccgcatctttgaacatcgatatcgatccaaccagtgagtagtgatggcataatgttattataaaataacagcttactagattagaaagatattgtaactgaggctttcataatagatgatctctaaaatcaattcacaagaggcgcagtgtttagaagctataacatctaaacaaattttattactaacaacagtaaggaataaactcaatgctaatgagaaatgaagcaggaactaacaaggattttcatacagttacatatttagctatctcaatactggtttatttcctgaaactagattctaacagagaggacgggttatggcaaaagaacaaagagtactcaccactgtcaacaaagtccattcatggaaaaaaccatgctttctgatggcttccccatctggtgattgagaagtacttgctagcaagcacatgctcccaataaacgacatctctatagtcatcatgtaggaggtatgctttttaacctgcgttttattgaaagggtcaacaatggcaatgggatgcttcatggaaagtacaatgacaagtacaacctgagatgcccactggcacaaagacgaggccaaaccagacaatacagatgcaactgtaacaggaatgattccatagagcaagatatagtctgaattgccaccaccagaacctttgctgctgctctccccaatgctcaaaaggaccgcagcagcgattaagagggttaatgcaaaaatttgcttgggtgattgcttttgcctgcatgatataatccataaagagataaaattaatggataggcccttaattcagatgtttagtgacagaatagaccagcatgtgacatgtggagcataagaaaaaaggaaacaatataaagggcagttgttagaacacaaccaaacgattcatgttccgtgtagtaactagtaacaggtgtgtaaccctagctctaatcctgcatgacatgtagtgaagaataatatgtaatgggcttgttttggttaacttttaccaaatacccttgttttggtttaacttttaccaaataccaggaaaaagtaggtggtgaaggttttgtagtaataaatctaatcccttctttctataaagctaatgcccactaaacacctaaagctcaacatgcaagcatagtatttattagcactcctaaaacctaacatgcaagcatgccacatcaacctactaagcacacaaagctcaacatgcaagcatatagtaattatatctataatttatttcattctaaaactaaacatacatatgctaaatcatcattttcaaatcatttctacaatatttcaatccaaatcatttctacaatatctagcatatattccacaacaaagcacggcgcatcatctagttagctatatagaactgaacttttctaacgcactccaatactggtttcctccaatcttttaaaaaatacaattcccggcaattaagggatccagtcattttctattttgcttgtcttgtcctctttttcctactcagtccttacctcctttagcgtgtggacaccatcctcactggtgggcaggaagtacgagtgacaacaggaaccaacaacgaaaaatggcacacatcatccctctcacctctctttttcaaagcaggctcatagatgatgtggtcggacttgaagcaaaggtggtggtgggtggtagccagtggccagcaaggatgctggtaacaggcttccatccccacactaaccacacatggtcaatatggacgtcctgctggtcaacacatggataaggcatggctgcaattcttgagctactgctcagatccacaatcatcttcctttcttctgccgttttccggattctcaaaagcaccacaccatcatcacccttgtgtttaattgttgccactgcccaatcaagccacaaccccaccacattcctaacctgtcagcaacctctgcttggtgcatttacgaaaagaatggtaaagatgctggcaatagaggaaacgcaagggacaaattggctgtatggtggaacaaagggcaatttaggatttcatgtgcggcattctgtggtattaaattacacgcagtcataaatagctaaattgtgcatcttttggtgacgcggaacaaaatgttccagtccttaactttgtttctttctggcttgtcaccaactcaccatatgtcaatgaattaaaaagggaaatggtacagaaaataaacccgataatgatgcgaccagcaaggccaatagagttttaacttgatttgttaaggaaaaagtcttaaatatcatgaacttaaattgcaatccctaaaacagtgaccatggatggtaaataaggatttcagttaaagcctagttatataatatgcaaaaatcaggacaactagttttcccttgggtggagatctaggaccatttaaaggattgaaccataaaactatgcatataaacaaagcgaacctattgttttagcagtggcttgaatacaacattactccttacattgacttttgcaagattcccatgtatttgattcaaacattgtaaatctagcaaaacaaagatttagtggcacacaaacagtaccattatatttgtacttaaacaaaaacacatccatatggtaataattctgtgattgtaaataatatattgtaaaataaattaacagtaaaaagtgtcaatgatatattgtaaaataataaatttacagtaaaaattcaaatgttaagatcatgccaggccaaacagtggcattcattaagggaagttcaaatattagtgacacaaacacttcatggttataacttcataagatcatgtgcatcatcaatacattgtaatatgtaaataggaggtatcaccaggacataccccaaaataagataagtgaagaatgctgtgaataatagcttggtctggttaaggattgagaaggtcaatgaatccaaattcttgtatgatatctgcagtaagctattctgcaatgcatatatagcagcgggaagtcctgatgcagtaagtgatctggtgatactccaattattgaattgcttcttcagactaccttctgccaccaataaaatgactgcacatataacctatgcaaacacacattctatcagaaacagccaggtcaagaacaatttagaccaaataaaacttctgaccagacctttgctacttcgattgaaagaaccaatgtagtcactataacttcttgcctgcaagagtagaagcaaaaaaatgggttcaacacattcaactatatgaccgtaggagaggaacgcaaagagatccaactccatgaaatgcaaaaacctcacatacaaggaattgttaaattgcaacacaaattgtctgttaactagtataattgttcatcattattaaattatcaaagaatgtgcccatgaaaactatttctgccatcttaattactagcaaagaatcaaacctgtttatagaaaacacaatggctactcggccagtaaaagccagctacaattcctcatgggtggttttaattaccaaatctgaactcaaaattttaatctcacgggttgtcaggttcctcctctgttataacctgaaatcagtgcttattcatttaaaccaaagtccaatttcactttccgtcaacattttttcccctgttatcaacgagagtactggatttttattgaaatatatttcgaactagtcatctaggttcctatatctcaagcagctcacactgcactgttttcatcagcgatatggtcagacaaacagtcaattaacttctaagattctgacgcggccaccctcccttcaacggcagacaaaatctgacgaaccgccggtgctgcccgttctcccgtcttcctaaacctattcgactccccgagaccttctccccacaaatcgaacccccacataacgcgatcgaatcgacaacgaaggagcccccagcgcacggcgagagacgcgggggggggggggggggggggggcgtcgtggtggtggggggtacctgacgaagcgcttggagatgaggggctgggcgccgtactgcagggtaaggagcgcgaggtagagcgccaccttgcgccggcccggcgcgctcgccgccgtcgacggagtagccgacgagcccattcggcctctcgccgccgcgtcgcgccgccctcccgctcccgatcgaagtcgaagccaccggaattcggccgctcggctcgtgttccgtcaagctggtcgcctcgcctctctttgcttcgcttgtcggtaacggggccgcctaccgtcccacgcgccacgccgtggtgggagtgggactagcggaagtgcagagtggtggggatggggatttggtcgcagggtgaggcggccgactatttgggattcgaatctctgcgtgaaagctgctgtgcttagtgctctacgatttttattccatcgcttctttcctcgaagaaaacttgtcttcttcgaggaaaatacaatcaagactctcaagagagaataaaaggcatttgatgaatctgaagccaaattatttttttgttcatcctagcctaactactactactaataaacaaagaaaaagggaagctcaatagtgagatttaactttcatctccctagataagctgttatatttgtttatgtatatacatagtaataaaactgtaagatgtctctatttaataaatgactaaactgtggtataaaaaaacttctatttacacagataaaaccaggttcccatcctttcggtgcatactactacctgtctacctggctagcacctctgtccctgttacaacaaccgtcggtcatactgaacctttgcatgagccagttttcctcatggaggtaacaggcaaaaaaaaacatgtgccttcctccagagaatctgcatctgtcattgacggcaaaggctaccaacggaagcaaccaggtggagaaatgccaaaggaagttcctagctcttcccaccaaggcgctcatagaacaagatatagccatgatctgtgttgccaccacaatgctcccgagaagagccatagaatgtttgcagggtggattcctcgctgatctggacggtgtcatcgtcgaaagaaagccagttaccatggcttttaatttggcttacgtagtgtccatggttggggctgctcccaacatggactacaaccgcaaagagggagtactcgcagtcagcgtcttcagacatgctgcccagcttcagctccaggggatataccactcggtacgacagtttcttgtgccggctaagctgctcaacgtacttgaagcgcttcaggtggatcaccaatacgtgtggcgccttctttatcttcattctcttgtgtgcttcttgcaaactgagcatgcaaccaacattctggtttcagtaactgttacagtgaaaatatgaaatcaagcaagcaaaatagatcccctctaacaaggtactagttactaatgcattttttttccatctaacaaacaacaaggttgaaaatccagcagggtcctctaactagacctgtttgaatcaatttattatattgcctatatttatggcagctagtggatagaatttgatgaacttaaactgtcacaaggcctctgcttttgccccaataaagagacaaaaattgggacctaaataacatatagcactgttacctgctgcatttgtcacaaaagaacttatcctcgccatttaaaatctcagtggaaaagaagctcttcaggcagcttgtgagcgaactattctgttccacgtcaatgctcaaatcaaaaaacgtctcatcttttgctgtgatagtatcacacattaggcatttggtttcattggtcaaaataccctgcataggtaaaagggatgattatgcacaaaatccttgggaaaaaaactccaagtctttgttgcagtgatatttctcacctgaaaagtcctgtgcaccaatgtaactaatggcctttctctggctccatttgctaaagcattggctgccccatttgagacctcttcaggagtagtctcaggagaactatttgcagttctacaatcttcttcaagaatatcaataatatcattcactaagaaattccagaactcatgggcatcctacagtgtaaaatgaaaagagatatgagttgtgaaagacagctcttttacatagctaaattttaacaagcacaaccagaataatagaacagttcatccttctttttaaaaggattccagattagcagagaggacttctcttatacataatgagaaaaaagcatagagccagagttgaaaagtatcgggcaactttattagactggttagatcaatggtgaaagactcttcttgagaaccattcacccttacaaaataatatgatgtgcagcccaaaagatcaggacatacacatagcagagtttgcacaattcaattttacactaggaaatatataacaccattgccatgggaataagctgtgtcaataaggttcagttattatcagattgtgcaatggacatgatgcagtgctaatgtgaacaaatctgcacattacctggtgcatataacttctgaacaattcattctgtttcctcactctttgaacaaaacgttttggtgcaagaacaccagtccttttcttcgctagagttatctgcaaaaaatatcatcaatctgttggaagtgcctgctacatttgcaaactaatcaggaagagcggtgatcgttaatgcaagatcctataacaggtttatggcatgctttagttgcaacttccaactttgttcaatgcggcttcagggtaagttatccaatcagtcagatgtatagaaagcagaacaaagttgtcagcaagcaccttgcaaagctgagaactgaggcaaagcaaacaacaatgataattggactgtacaaaagagtttgcataagcaagtgcttaggaaagcttaatctctcttctgaagtaaaagaaaaaaaatattgaatcgactgctatataccacagtaattatcctcttgattcaaataagaaagagactgtcaataactatggatagaagaactctcgtttaccaaaatttaagtggtatttggacaatgatacggttccaaaatattattctaatccaatttccaatatcatttgttgttattaaataaaaaagtaaatgcattataaatgcatatttcataatgaatcctgttttataaccaatttatgttagaaaatttagaatatttttcacatattgattatcaaaattaaaaatatcttactacgcacattctaggagtcacttatatgtagcaacaatggaattggtacatatattcttttatatgaagaaataatacaaccaataaagtagtatgtcagctaataacgaggttttttatgctcctccttcacctgtgaaaaaagatcagccagacaagtcaacaaattgtcctcggagtcttctgtgtttttgtaagttgcataatattccagcaactgctcccgaaaagggatgcaatgataaagtgcctgaagaagaagtacagttttttagattcacaacagtgtaacaaatatttcctatgaagttattcttagcaagcatgaccaactgatctgtgttaagaacatgatctacattattactaatgaccaatcaggaataagaaacaaaacctaacttttaaaatgaagtgaaagatacttaattgcattgcattccttcttatcaccatctgacccactgctcatatactagtgagaactaagaagtgagaaagcttaaagctaaacatggtccaagtgtagcagtatagatagcatcttaaataagaatcctaatcttccataacaaacaactaaaggttagtgcaccctcaaaaggacataaaattgttgatattaagctaacactgattataaaaacatttttgtggtataaaaagtttctatttttaaaaaatatattcatctgatttgtaactatatagtgttacttaactaaatttcctatgaagcagatagaatactcagtcactcagatgacaccactgtttcatattccaggatactttattcaaaagttactattagagaaccagaccaaatatacaaaatcgatgacatattcacaactgaaagaggatcctaaagagttgttgaggaaaactgaagaacttcacaagaatcatgaaatctgaacacctatcttgaaatccgcctgtggcttgtgatacaaacctgtaagcattgtactaggaacaggttttttactttgtttacattgtactaagaaatattttttacatgcaaacatctgtgccactgtattcagttcatgcccttaatagtcaataccacaccatcaatggctttagaattcagaatagtactttccatgtcatttggtattagtataggcaacccacacaataggtcgtttatataattgattgtaagttgcaacagcttcacatgattaatgagttggctgattgccacggagcatgtagccgagtggactaaagcatttaaccaccttctcctattaaacatcagccaaatgaacagaggaacccagttactgctgaaccatatgtatcatctttgcccatgactctccatcccatgaacccaaacaaacaaacaataaataaataaattcactggctagtcccttgaacagtgccgggcctagaacaatttgacgactagggcaacaaaccaaaaccaccaccaccaccaccaccaccgatctcggaagaaactacacacacaaacattttctcatagaactcagatcatacggacacttaaccaacccggaattgccgcgcatcacatccatcgagcagcggagaaggggggccggctggggttaggcagctacctgcaggacgctgttgcagtagcaggtgttgccgaagttctcgaggccgaagtagcgcgcgccctcggggaagtggtcgccgagggccttctcgagcttggagacgcccgcgccgaggaccgagaggcggtcccacagcccggacgcggcgctggagagcgaccggagccccgaccccgccgccgccggccggggcctctccgcggccgccgccggcggcggcggcgggtcctccgccgcgagcagccgcgccgtcctcgccatcccctacggatggatggatcgctcggttcgaacgcgcgtggcggcgggcggattaagggggaagaagaaggccgcaggaggcggcgaccatttagcccccccaaatcttcacggtttgatcgggggagggaggtggaacttcagtggaaggcggcagcacagcgcagcgcgccctctactagtggagttgttggctttggctgttgcccatttttcttcggagtttatataatgcctatctctttcgtgtcatgtacaactcgaaagagagaagggtgcgatgggcccacttgccagtgtcttgtgataagattaaatagtcaatccatgtatacaaatgagattaaagccgcgaatgaaatgaaatgaatatggttccccctcgtgctcagggtttagggctgattcctcaatttctttagaattatatcgaattattagtgtattctccgctagtttgtgtgattcgatctctcacaaatttagattataatattgtctttacattttaatacttttattttttttttcaatgcccattttgcaatgaccgcgagtgctagtgccagtgccaataaatataaaccatatttaaaggtgtgttctaaagtgttaaagtagtgttgaaggatgaaactgagtttgtgacagttttcaaagacaaaactacattaaataaatattggaaagttaaaatgttggttttaaaaaattctaagaatgatgatgaatatgttttttcacaaaaaaatcatatcaggaggttgagaatcatgtccattataatccaccatccattagctaaaaagacatgccctaataccatatattttttaagcacaaagccatcatcttccaccccaatagtgttagtttggacagggaagcctatctagtcacatctctcttcaaagtagtatgattatattccgagcactatcaatgatagaactattgagcctcctttgcatcaaagtcaagatggagcactaaggtatggaaggagtcattttagttggttattcattggccgtgactagaggttggctcaccatttggtcaccttgttgtcctctacattggccatgccactttcagttgtagcctctatcgcttgaagcacaatatttcaattgcctcaggtctgcatctccacatccatgctatgagcataaatgacaggataaaccatggtccaaagagaggcgtggttgagaagccaaagaaggaatctcagcattcgtggccttgactcaaccatgttactggtggaggggaagagaagaaacatgtgaggttagttttgtctttttttactaccaccaagttgacaaatcagcttaaacgtaaaataatggtaggtgtgttgttttcagtgtgtgtgtatatatatagcacctttgcaaaggtactcctccgcttccatgtacttatcgtttcggaaatgctatttccattgctatcattttcgactaaagttttcttccacaaatacttggcactacactatttccaatgcataatttcctattttgcccttgtggctgtctagcgcagaatcaagagttggctctaatcaaaatttgaaatattgtctagagaagaatctagaaatgtagaataatgttgcccaaatcaaaatttggatgttctctgttaaagaaataatttaccaaatgttgcatctagactgttctgctttacaactaatactatgcccatgctttataacagggttgcgagggatacatgagaatggtttcataagctacagttttatctagcaaagtttattatttccactgtactctgttaatcagacaagtgcatgtcctgtgggtttctcaggacaaactttattttctccaaaatcagtgggcggatttggcataagattttaagacgtagaattgcagaaagcccaagtggatctattgtttaacgtgcaaattcctatgatgacaggtgtctgaagataatgtaagaatgttggagtttcagttgacgttgcttcctatgtttaacaaggtttgtatagaacttggaacaatagtttagtatcaagttagaagtgtgacttggaaaattgcttgatcataataccttaataccctggctgaaatcacatggctcatcaccaatcaatctctctctccatagatatactgattggtgcttcagccttttctgaaatatctttgattcggaatgtttctgaaggtgggcacatgtactttggaaaatatcaacgctcgtcagatatatatatatatatatatatatatatatatatatatatatatatatatatatatgctttatatgtgtgttaaaattcatatggatattattgaatctatacgagaaatcaagagaccagaacgtatgttgaacggagggagtactttctttcgggtttcggctatgagcctatgaatttgcagtttactgacacttgtcgttttgctggcaatcagcgatatcctgaaagggttgacattgaggaaatggcaaaattcgtcaaccctgaaaacgaaaatgcaacttggtctttatcttcctgttgattttgtactcgccattccatactgcaaaaatcatatcttactataaaattataatccactaactactaaaacttaacatgcaaataagataccacatcatcatccactaacaatcaatacatttaatatcatgcaaacatactatattatctataatataaattttattatattttagagctttttaaatgaaagcatgttaaatcatcatcccacataatttacataatattttaatatatatcttcattgttatttataatatcttatgtacctatctaagttcatcctcacttggttaatgttatttctctcttctctaattaagtcatatcacatcaattgattttagtgcttatgtaagttacgtttatattatttagttatattacacattatttttacttattattattatactgaattcccatagcaacgtgtggggtttcacatagtatattctaataattaatcccgtggtagcctcgtgctagtggtgtggttcttaccatgttgctggtcagtccactgcacttactatgcaagtggaataataaccttgcaaataaatatttttttctgactagattcattccaagaacaatggtgcagcaaactactgatttttgcactaaattatccagaaatgttgaaaatcacacatgtatgtggtccgcaattgaacagcactgcagggttttagcagtagccaaactcggtcgcagagtcatgtgctgagtttaccaagtccctcttcttagggagaagaatgcatgtgctctgcttaactagataagttacattactgcctataggcactggaaatgtaacatattacagacatctatatcataatttaattggtccatcaaagattgatctatcatagttctgggacacgatgtcatcgaagttcacgtcaggtttgcatcaggtctcgattttactttgtgtgaaaactcttctgggtggatgatgcaagttttttattttatttttttgagaacatggatgatgcaagtttcacaatatttgtttatgcaagtggaattgtgtgacttggccatctgttgcaacaccactcttatccgttcctccacacaagataatctcattcgtgcaattatatccctaacagtgacctgttctttgtagccgactaacgcacaccatttgcttacttcagaaccattttaatgccgctggacaatcatggggatgataataatctcactcgcacaattatatatcgcttacaatgacctgttcttcgtagcctactattagtattaaccatttgcttacttatgaaactttttcatgtcgctggagaatcattaactgcaacaaagggtttcttctctcaaatcatggtgacaaactgacaattaactgcaacttgctcactcaatcaagcggaatgcccaaatactactaccctctcgccgtttttgtcaacgatggggcgtagcatagtcggctacaagctggatcaaattaagaaggaaaaaagaaaaagaaacttcatcgccttcgatctccaattggacagattgaggctgcttgttgactctgccgctataagtaccgtaccacatggtggtacatacacactcgcgttgagctgtgcgggctattttttttttctctctgatttgctgaattgctgctgcgggcggtggagatggccagagggggagcgatggtcgcggcggcggatgccggcgccggcgccggcgtggcgcccgggtacagcagcgagatcacgttcaccgtggtgatgagctgcctcatggcggcctccggcgggctcattttcggctacgacatcagcatcacaggtcagtcagccactcgctcagttctgctgcatatatgccatgaatttctggcacgattatatatcggacacaatccattcttgcgtccgatgatcatacaaatcggacgcaaattatatatgccatgaatttctggcacgatttggaccgagtttctctagctcttcgcctctttcataatagaaaaaacagagtttggctcaagatttgtgagctgttctcctatgcttaaagatgccatccttgtagacatctaccagaacagaccaacgcccaaatgatccaccgaaaagggagtaaattgaaggcattaatcctatcgagatagtaagacaactcatagattgtatgatgcagaggcggaataaagtgcaattttactctctctgttttttctattactgaaagaagctttgtcagcttcattttccagttcttccgacagatccagtcgatatcctacttgactcttccaaagttaaaagtttgagttgaaattgatacgatgtgactgaaaaattatgtgtgtatgacagatcgatgtgatggaaaaagttaaaagtttgtatccaaacacagccctacttagattagtcgatcgagtcaggtgtcacgtttgatcggcgtggagattctctgtcttgtctcctcgtcaattggacctttctacttgatgggggcaattggcaaggctagcttgtcaagttgccatttccttcagatagaacagtcataccgctagtactacactactacctcagaatatcgttacactatcccaggtgaaaaaaatcccaggacatttttttactgttacagatatgtactactacgagtacgctgtacttgcttaggtaatgaatgttattaatgattaatcatgcagcgtgtaatgaaaaaggacgcatacgtacccaaagaccaaggtgcatacttatcatttcgcttatgctgttcagtctcatcgtttcatttatacttattgttttttagaaaaagaaatgttcttttaacaaagaaacaaacatgaagtccagagatatgatttacgacagtgaaagcagaggaaatttgtttacgcctgatctttcccacaagaaaataaaatacttacattttgaaaatcaatagttagtcaacgctacagtatgcatggatcgcggaaagagacaagacgcgatgtagaatatgcgagtgtcatgatctcgagctacgcaaaacatgctcatttctcaggggtcacaatctctcattgcggccctctcacgctgctgatacggcaacccccagcaatctcccctgctgatgcaactacggttatgaaagacacaaatcacacgtagttcatgatgatttgcagatgagacacaatatgctacgactagctgtttttttcatacatctatctatctatctatctattatatactaaaagtccattaaacttcctacaaacgctcctaatccgccacgtggcactcctacaaacgctcatatgctgccatgtggcgctctaacaaaataaaaaaattgttagaaattctaaaaaaagatttagttagatctatcttcgaaaaaagtagtccgaaaccttcctctctgttcggtgtgcgcacgcatgttagccatccctccctcccttctgttgattttttctctctcctatggtagttaagttagttaaggtaaaagacatccaatgtttttatggccatgcatgcatattaatttattggtttcggtagttctataaatagataaacaatcttttaaatagttgtaacttttaaattatatttcaatttatgacctatttgtaccattgtattttttaattaaatcaataattaagatccaaatagactatgatgtaacgctacaaaattattactgctgaactcacattcatcttgaggcctctaagaaaataaaatcaaaatatgccaccctaattttttactcatacactgttagatatctaacaactttgtgtagacttaagtaacttctgtcaacatctacatgaattggtcgataaataagatgatcgatcatagcatctaacttatagatatagatatgatctaataaattaagaaattcgaccatcaaatttcattaaatcagtggacccattgttttagcctgttagatctattttatcaaaacaaaaagaacacattcagatcaatttttatctaagtcggtggacccattaattgctttatatcattagatctctgtaaaataaccacatccggaacctccacgtccagtgcgaacatacgtacgtaaatcaaaattatctttacaggttaaaagaacacacaatagacctccacgtactaggtctagcggctctcaaactgtcacttagaatatcctacggtgctattaaattagagaaaatactattaaattagggaaaataatagaaaaacagacaaagaaaagaaagcatctgaatataggtttctatttaaattaatgggtacattgtttctggttgcagaattttttcataaaaaacatctcaaacctctctcctccctaccctccctgtgcagtgttaatgcccattaacatcgcataaacgcttctaagccattaaacgacattcttaaattagagaaaatcataggaattttgaaaaaaagacacatctaaccattggttttgacttaaatcgttggacacattattttgaatcgattgacacactatttttggtcattggatctatttttataaaagaaacaccccaaacatccttccctccctcccgctcctttgcggcatgcggtgctaaaagtccattatacatcttataaacactctttaagctgttacattgctcttttaagtgagacagtatcctccaaattctgacaagaaaagaaaacttccaaccatcgatttcgacttaaacatatgacaaatcatttaggtcgttagattaatcatttagaaaaacatgccaaaccttcctccctccctgcccgtgtgtggcatgcaccattcctttactctctgtttttttatctccctgacaattaaaattgaaattatctatatgtcaaagaaaaaccacaaatggatctccacctattacttatatcctgttagacatctaacgactttctaccaacttaattaatttctcttaacattgtccatgtttttctttttggtaaaacttgctatagtacattgtaaattcttgacatttaacgtagaacaatctagaaatttctatttgttataagagacttcagtttagtgagaattcactaaaaatactatgaatctatgatcattacttcaatacacgagagaaaatttaaacatatgcctttaccctgtgcaaggttatatgcacttctattttcatcccaatttgcaagatcaaagcttgatgattcataaaacataaatctaaaaaaaaaatggacatgaaataaattgaaaaaatgttgttggatttaaaactcattctaaatagaaaatttcaaacattttaggaggattgttagaatgaaaatagatataaaaattaactacagtaataaatgacattattggactattttggagggtgtgggcgggagggggtgcaagatatctttcagggcagtcaaaatatataaaaaaatttctcatgggaaccacatacattgtttcgacacaactgcacgatctcaagtaattttattttagaatttatatgtagcgatggtgccaacgttcaaagcaaaataagtaaatttaatttagtttagaatataataaaagcattattattaaaagtcacccatacataaatattcataagaaaatttcaccacattaagtaaggtgcccgcgcatgtgcgcgggctaccttcctagtttttctaaaactagattaagtgaaaaatatatatatttggcaccttctttttttcatctatacacagctatattgttcagttcacgtcattataacctaaacttgtcacaattaaaattatttatattttttctccatattttttaggtctctagactgaaattgatgggtatttttgccatccctttatcataaataataatgtgatgaaccaatagttctataatattttgtggttgtttatgaactatgcatgcaaatgctttgttttctaccaggggggcctaggtttggcccaagacctaggccggcccattgtactttgtgctgaggaagtatcttatcttacatgatggaaaaaatacaggtcatagtgggactgaaattccaaaggccttagatccgcctctggttccactctattgtggaatttgtagttatgtaaactgtcatagcttgtttgaaaaataaacaaattagggctaaagacattatctatcaaaattgtttttaaacataattgttttcactaacaacttgcactaaaagaaaataaaaaattagactttgcatccaaccagattagaataattgatctgtctcacatagggtctaggtagtgtggttgtgtacttgttggtgcatgactttatccttacggtttaaatcttgctacctacaaatattacacaatatgggtgtgctctccgtctctttgagtatgtgttagagggtttctaatatgcgtaaaaacacattagatgagtttcgagcgatttcatttatgcactataaactttccctcatgccaccaactcgtgccaaaaaaaaaatcgtaaccaatgatgtcaaaacattccacccaaaagatctctgatccattccgtgcatgatggtatttattagagcgattcacacgaggatgtgattatgttattggtggttatgcttttttatttttgaatggatgggtacattattgtaaacttttaaatgggggtatggattttttttcccttagtcatatgatgattaagcgatttaattttgtttgcaatatatcgaaaaatttcaggtggactgacgcagatgcagtcgttcctcgaggcgttcttcccagacatctgggcgaagatgaacaacgccgagcaggacgcgtactgcatcttcgacagccaggtgctcaccaccttcgtctcctcgctctacctcgccggcgttttcgcctgcctcatcgccggccacgtcacccggagggtgggccggaggaactccatgctcatcggcgcctctctcttcttcgtcggcgccatcctcaactgcgccgccgtcaacatcgccatgctcgtcatcggccgcatcctcctcggcttcgccgtcggcttcaccaaccaggtgcgaacgcgaaccaggcgccattgccaatgatgggagagtaagtcttgcgttctaatggcggtttctctgtgtacatatgttgcagtctgcgccggtgtacctggcggagatagctccggcgcggtggcgcggggcgttcacgagcatcttccacttcttcctcaacgtggggatgttcgtggccgacctggtgaactaccgcgccaacaccatcccggtctggggctggcggctgtcgctcggcgtcgccgtcgtcccggccgccgtcatcctggtgggcgccgcgttcatcccggacacgcccaacagcctcgtcctgcgcgggaagctcgacgaggcccgcgcctcgctgcgccgcatccgcggagccgccgccaacatcgacgccgagctcaaggacatcgcccgcgccgcggaggaggaccggcagcaccacaccggcgcgttccggcgcatcgtgcggcgggagtaccgcccgcacctggtgatggcgatcgccatcccggtgttcttcgagctgacggggatgatcgtggtgacgctgttcacgccgctgctgttctacacggtggggttctcgagccagaaggccatcctggggtccatcatcaccgacgtggtgagcctggcgtccatcgcggcggcggcgctgaccgtggacaggtacgggcggcggacgctgttcatggtgggcggcggcgtgctgctggtgtgcctgacgggcatggcgtggacgtacggggcgcggctggggagcgacggcgggaaggcgatgccgcgcgggtacgcggtggcggtggtggcgctggtgtgcctgtacgacgccgggttcggcatctcgtgggggcccctcaagtggatcatccccagcgagatcttcccgctggaggtgaggtcggcggggcagagcatgagcgaggccatctcgctggcgctcaccttcgcgcagacacagtcgttcctccggatgctgtgcagcttcaagttcggcgccttcgcgtacaacgccgcgtgggtggtggtcatgacggcgttcgtggcgctcctcctgccggagaccaagggggtgcccatcgagtcgctcggcgcggtgtgggcgcagcactggtactggaagcgcttcgtcaagccgccgccgccgccgccatcgacggcggcggagaccaagcaggcggacggggctccggcatgagagacgtggtggtggggggctgggcattgacacgtacgtacgttgtgttagctaatgctgatgggctcgtgatgtcgggcactgcatgcatggtgcggtggtgtggagtgtggactcgatatccatcggcatcgccgttgttggggttagccacacgggcaactgggcaaaccggggcgatggacatggatgatcgaacaagtcgactagttctgtcttgtgtaacgcagacacggtagagtctgaccatcaaacgttacttatcacatatacagtactccgcagtatctcgattgatatgagtcgttcgcgtgaaaacaatgtgggcgtaacgaattaacgaaagatacttgtttgtttgtttagggtgcatttggttcacacctttacggtcaaggttagatgagatatggcggtccataatttgctagatatgacgattcagttttttatttggtacagtgaatatggtgattcaattttttgtttggttctagagataaaggtggatttggtgatctattttttttgttagagggagtagaatggatgagtggatacaatcacccctacattaaagatggtgagtataccccccttcaaattcatcaaaaccatgaaaatatcaatcactacaaacgaaaaaaaaatctaaagggaaatataagaaatcaaaaataaatagaagagggaaaggagaaaaacgaaaaaaagaaaaaaaaaggtcattcgcgctcttcttgccggccgccacctccggattctcctcctcgcacgccggccgccgcctccgggcttgcctccttgctcgctgatcatggcctcatcttcgggccgccgccttgcctcctcgttcgccggccatcgccaagtctccgggccaccgcctcacctcctcgttcgccgaccgccgccccatctcctcgcttgctcgccggtcgacaacgatgacgatgtaaccacctactttctcaccggatccgtcccctcctgatccgatcgttgtcgttggcatctcctatcccatgcccacaccggtcgttagggcgccctgtcccgctgtcgccgcctccggcctcgccgctgccgtcgcctcttcccgtcgcctcttcccaccaccgtcgcgctcccttctcgcattggctgccacactcatcgccgctgtcgcatggtgaggggtgactcgacccagcttggttaaggtttaagaaaaaaaactatagtaaccattattaaatgatgtgtggatagaaatagagtggtagatatggggtagagtaaaaagaatgaatgagaggtgatggataacaagtagtacaattagtgctaagtattttaggataaatttaaaattaaaaaaataattattttaggataaaggtagtagtagaaaactatgatctcatgaacgttattcaaccttcggtaggacacgcgtgtatgtgttcaggctgtacgtggatcatatgttttctttatttaggtggtgtttgaaacacatggttatttaagctttaattattacaaacttgataaatagatatatttgataatttaaagcaacttttacataaaaaattttcgcacggaacataccgtttagtagtttgaaaagcgtgataaaaaaactgaggtaaaatctgtatcttcggttccgttcattcctccaacaagagttgaacaaagataaagatttttgtggcatgctttttaaattgctaaacggtgcgttttgtacgaaaactttctatatgaaagttgctctaaaatatcatattaatctatttttcaagtttatactctctccgtattttaatgtatgacgccgttgactttttgacaaacgtttgacctatcgtcttttcaaaaaattcatgtaattatcatttattttattgtgacttgatttatcatcaaatgttatttaagcatgatataagtatttttatattcgtataaaaaatttgaataagacgaatagtcaaacgttggttaaaaagtcaacggtgtcatccattaaaatacggagggagtaataattaaaactcaatcaattatacgttaataacatctagtttagtgtaaaaaatttaatcttcatcttcatctttgttggaaagggttcacatcgtctacctttggtgctgacggcaaatattgccgttgcatgcatttgtaccgcacattcttccatgcataaacagttgtataaagtggccctatcacaaagattaattagaggccaactaatcggtacaattagttgtttctctccaaaacaaaattcagcaaatagaatatgcaagcctctgttatacgaagagaccacaaaccaaacatcagtacctaaatacttgaacgatgtatatatcttatataaaacttttagtattcatttggcatttggcattactactagctcccagatagagaattgtcataaaaaaactggcagcgaaatggagctactgatgaaatccttcggaatacaactcacagccatctaaatcaccctgcaaatgtataaactgatataagtttaaaagaaacggaacatatcaaatcttaaagagtaaaagtcaatgtgaattataccgtcagtagttgggtatagctacccaaaaaagtcctggtcaacttcttttatactgttctacaatctattctctgcactttgatgccgcttatattctatttactgacttttttccagaagaaaaataactaattcaccgattattaggcccctaattaatcacaatggtggagccactctatgcagctgttgattggagaatgtgaggcatagatgaatggaacggcactgtttaccgttgggcccaaaggcagacgatgttcatcccatcagaaagagattgtcttccctcgcttcctcggtcagccttgctcacacacacacacacacacacacatatatatatatatatatacatacatatatatatatatatatacatacatatatatatatatatacatatatatatatatatatatatatatatttgccgggaagaccgaaggaggccatctgggtatattaagaagaagtaaaagtacatacagaatgctgccatcgcctatctaaaaggatgtggttttcacccagaaaaattcgtcaagaaaaggagagggtaattaaccctcgataacgccccaaggaaggttacgatgaccgaagacgtagccgctgtcggcccggtgaatatcggattaggctttcgcttgggaccctacaaccttgatggaagattgatgtccaccaactcagaaccacctcacggacaaatggcatcacgtagcttccaccacaccgcaccaacgtccctccgtcggccgacttcatcgaacaaccacccatgagagctggttcaggacccctccgttccaccacccgccggcctcctcgccagttttgaccaaaggagaacccatgctgggtggcattgcttcgacagcctgagcttcccctgatgacaagcagccgcctcaatccaaccaagaatattcaggaagggcgagggtgctgaccgacaatgaggaagacgacccaccgtcgccagctccttttgcattgccatctgggcttgcatcgatgccggtgacgctactgccgctccggctccggcgcccccgttgcctggcgcttagggcaccacaatggcaccccggttgcctggccgcgccatgggggctcgcagccgcaccaccaagccgctccggtagccacgcccccatcgagccgcggccgccctgggccggtgccaccaagcctccagcgctccaggtcggccacgccgccgccgcaccccggctcccagccaccccgcgtcgcctcgctcctgggcaggccgagctactgccaccgcccccagcctcctcctgccgtcgcctgtgtcgccccgcactctccggccagatccggcggcgggagagttggatctagccgccggggagggggggggaggggctagatccagcggcggcggcgccggatccactacctcgcggtgcgccgccgcacggccttccccgccgtgtgccgcctcctcgtgctgaagaatgtgccgccgccatcccggcggctgcgcggtttccggcggcgcgctccggcggtggcaaggcaagggagaggaggggagggtggtggcggcgaggggtagggttcaccccctgagcccgcgcgaggacgacagggagcgcgaggactgatggtgtgtgtcttatgctcacacatgtttttggaactagatcctctcctgtaatttagaggaacactgtgtcaacggtatatcgtatctatcaccacagtgaaatgcagtagcattgttgcagcaaaagtactgcatgaacagtaattggtttactgtttatgtaattactatttgagctttgtctactttctcggtccagtgtctgactgtcccatgtaccaccatgtcgtcagccggatcacggaactggagggagaatctgaaatttgcagaatcaactacttccgttttcaaactgcacgttattttagttttatcctaagtcaaatattattgtcaaatatttgtctttgatcactaatttttaaatatatagtttaatataataagatttatattattagatttaccataagaaatgctttcatagcatataattcacatgctattaaactataagcagaatgatgagtaatttaatttgaatcagaggtagaaatttgcacgtaaactagttccccgttagatgtgagatagaaaattttcatttagaaatgatcaatttggattgctaccgaaacttatcgtaccatttatttttttggtagtttgaacagatcgaccacttgtagtttatattgtattaattgaagctgatagttaacaaccctactacaatttggttcctaaagtcctaatcattagaaattgagctaggttgctccaccctaccgatatgactatcggttctagctgtgcgttgacattacaatcagccgttggatgaaagagagaagagaaaatcagattgctcgcctatcatcggcgtctctctttggaccacaagcttatatataactatttgtttttttttggagaactggaaaaacaattgtgctgtactctatatatagtcttagagttgtggcgcagcgtatatcatccaaaaatacaattgccgtgtcttctcgagttcacttcctaaccgaggaagctagctagatatgtctggaggtggatcaattgccaacgatggtgaagaggccgccggcggcggcggcggcggccgtggcgaggtgacatttacagttgtgatgagctgcctcacggcgggcgccggcgggctcttgcttgggtacgacatcggtgttacaggtcagtggctagtaaactgaaagtctgaatatgccttcagagcttgaccctgcatgtttctcgtacatggcacggttatgtctttctgtttctttcttctcttaaggttactgaagatttatctttattaccgtaggtccgtaggggtttcaaaaaaatatatctttactaccgtatgtttatgatccattgttactctgattcaagtaagaaaagcgatatgtagtgtgttttgaaaggttaattagcgctctgcacattttgtgctcgtactactagtaaatagcaccgtagcattactcaaagagtataccacacaactaaagttccaaagcagtttccttttcatcataatatacattatctgttctaaaatatagaaacctaaaatcatatgtgatatagtaggatctggatagaactgtcttatccagattcttttactaggatataacacatcctatcctaagttgctatattttggaagcgaatgatatattagagttatgcacattgtgattatacataaaatttcatgtataaattaggcagatgttcttattcatgtaaatatataacatggtctctttataaagtatttttagtggttttcattttgaattttagttattttctatattttttttacttcaaccattactatatgaacacacaactcaatttttactacatcatctttttcttaaaaaaaacttacaaatttatataccttctcatgatgacttcttttcaccttgttttagtaactttataagaatataattgatgggttttctaattgattcattgtttatctgaacagttagctagtagtagcaactattgatgaaaagtactcctacatgacaagataagattaccttctcttcgaaaaaagttatgtaagataccttttttgaaaaaaaaaaaggatccagatatttgtttacactccaaatcggcaccaaaaacaggcatatccttttctgttagtcaacaccacagtctcaagactcaagatgatgcatgcatgtcagttgatgtggatatatcatatatatgccagcatacataatgagtgcaattgtcttcattctttaatttcgcacaaaacaaacacattatctcacaacttcgtgaatcacatcttgcttcaactacagccgcctcaatatcaataataaatctgtttcaggaaaaaaacagtacaatttggaatttttataaaagaaacaaaaaccatgcgaacacatcaacaggcttcaacattctttctgccatgtccaaccttgatttgtgataattatttgagggtatgaatgaattaattaaatattataaagctaaaaatgaatttaaaagaattttctaagaaatccatacatagattttttttttggcaatcgttccatttaggagctcagaaagctttcgtattattagtccattctatttgggggaaaagaccacaaggttccatacacgatatatatatacatgcattatatacaagtctcatctatgccatatatgtcatgcatgcgaagaaataattcaccgtgacaaaaatatcaaaatatcatattataaacataagattgtaaacatccaaattttggacaaaaacttaaaatctgatatttcagaatttttatccaaattttgaaagtttttatcccagaggtattttgatcatttcgacaaatttgtacaatactaacggaaactaaccggataacgatggtaaatcgtagaagttaagaaaaaggcgatggcatattgtagaacgtgataaagtcagtggcaaatcgttgacatgtgacaaagtcagtgacatataatgaattcgaatacgaatacggatcgaatataatcggatacgaatacagaaatagttttttcacagaacacaaaaaccatcttaacttctaatagaaacaaatatcatatatatatatatatatatatatatatatatatatataattgctcattttatataaaatatagtataatttataaaaatatttatatttaaaataatattaatagtgtggactactataagagatgcgctactattataatctaaaaaggtatatcgaagatcgtaaagttataaagaaatgaggtatgtctcatggtttcagcggatatgtgaataacactattcatcggatatccgtatccatcggaaacctcgataccatatttgtatttctatccaagagaaaatatttgtattcatatccatatctgaactatccactccgattcatttttctccggaggtgacaaaaactatctgctccactttcatccctacatctcggtctctcacaagacacacagctaattagctctatgactaaatgaataaaatgacaggaggtgatgggtaaaattcccaactaccttaaagcaccacatcatttacctgtacaaaacatctcaattatgcattgtatttcttagcttttaaaattctactacatttcaaaagggcacttagtaatttcaccaccaaatcttgttggatgttgaattttcaggcggggtgacgcagatggaatcgttcctgcaggcgttcttcccggaggtcctgcggaagatgtccagcgcgaagcaggacgcgtactgcatcttcgacagccaggtgctcaacgccttcgtctcctccttctacctctccaccatggtcgccagccttgtcgccggccacctaaccaagacgctggggaggaggaactcgctgctgatcgccggcgtgctcttcttcgccggcaccctcctcaacctggccgccgtgaacatcagcatgctcatcatcggccgcatcctcctcggcgtcgccgtcggcttcagtagcttggtgatcgatcgctaccagccaattaatacattcgtgcatacatacatttatttatttgtaggttaattttatcatccttaaaatatctcgggaggtagcatattttttattgtaaaatttgatacctctaagtaaagtatctcgagatactaaaaattttaatttataatttaggtatctctcgaactaattttttaagtaaagtaaattttttcttatttgtaggacgtgaagttttcatgcgttcattgcatgtgtttgcattgttgctttggtcgcaggctgcaccggtgtacctagcggagatagcgccggcgcggtggcgcggcgcgttcacggcctccataggcctcttcggcaacttgggtttcttgatggctgacatgatcaactaccgcgccactaccatggcgaggtggggttggcgcctctctctcggcgccggcatcgtcccggccgtcatcgtcatcgtgggcgccgcgttcatcccggacacgcccaacagcctcgcgctgcgcgggaggctcgacgaggcccgagactcgctgcggcgcatccgcggggccgccgatgtggacgccgagctcaaggacatcgtccgcgctgccgaggaggaccggaggtacaagtcgggcgcgctgcggcggcttctccgtcgcgagtaccggccgcacctggtgatggccgtgctaatcatggtgttcttcgagatgacgggagccatcgtggtggccatcttcacgccgctcctcttctacaccgtcgggttcacgagccagaaggccatcctcgggtccatcatcaccgacgtcgtcagcatcgtctccgtcgctgccgccgcggccgtggtcgaccgccacgggcggcgtagactcttcatggtgggcggtgccgtactgatcctgtgccaggtggccatggcgtggatcttcggcgcgcagctgggcgctgacggtgggagggcgatgccgcgggggtacgccgtcgcggtggtggcgctcgtgtgcacgtacacggcggggctaagcgtgtcgtggggctcgctgtcgtcggtggtcaccagcgagatcttcccgctggaggtgaggtcggcggcgctggggctgggcggcaccatctcgtcggcgctcacgttcatgcagtcgcagtcattcttggagatgctgtgcagcttcaagtacggcgccttcgcctactacgccggatggttggtgatgatgacggcgttcgtggcggcgttcctgccggagacgaagggggtgccgatcgagtccatgggcgcggtgtgggcgcagcattggtactggaagcgctttgtcaagctggcaccggccaagcaggccgatgggccagaatgatgaaaagtattttctacacctagatgtgtatgcacatagtttaaaccataagcgttacaagcatgtttgtccgaaacgtagtggttatccgaaaccataagcgttacaagcatatttaacgttaatttggatctgtaaatgtaggaataagttcattttacgtccctcattgtgatgttgactttgaaattcggtctctcagtatgccaaaccggtgtacccaaggttccagggaagtatagtgctcgatttcggctaacgtggtgcctgggttagtgtgagacccacatgtctaggcgattcggtctaaataaaaaaatggtagaccccacatatcagtgaaatattctctcctccctctctctctctttgtttgcctctacctttttctcagcggcgtcatggccgtcaactccccaccacgctagccatgatgttcctctcagcactgtcgccgatgcaagcccaccctcaacccgtgctctccccctcttcctcctcttaggaggtcttgtatttatacccttgggtgctcacttatctaagtaaaattaaggatgcaagtatggatacgatccgaatagtatttatagtgtctgagtatagaacttcgcttctcctttcttatccgaaacacctttcatatataaggcattattccgtataagacttggcatatggtgagtccgcggaacctaaaagtaatatgtatgtcttatctataacactgaaacttttatggaaaaataataatctctatatatggtttacctcaaataaaaaaaacatgtatttacttgcggctctacactttatctatgaagatatttcttttaacacacatatatgtatttttttctagcttatttacttctaccatttaagtaaattacttttatatatttaaatatatttaatattatactcatttcattatatatttgagtggaatttaatggttaaaacagatcttacaactactacattgtttgaaatatataattcaataaatattaaaaatagactaactcatatgagactctcaggccaaaagcatggagatatataatttttaaagtacgcatgcatacacgtgatcgaatggatcacatgatggttttaatcgaatggatcggtaggtatcatgctgtaagactaatctatgcgtgcgcacggattagattttacgattatactatggctcttaaagtcataattgctataaattgaggttgctccaccctatcaatatcactattggttttgtgcatgaattaattacaatcttccattggatgaaagtgagagaaagaaaaatcctatcgttgtgtctgtttggaccacaagcgtatgacgatttttttttgtaggagaactggaaaaccaagtgtgccgtactctataaatagtctttgatcagtgtggcgcatcgtttatcatccaaagatacaacgaccgtgtcttctcgagctctctccctgacagaagtagctagctaggtatggctggaggtggatcgattgccaacgatggtgaagcagccgccggcggcaacggcggcggtgacgaggtgacatttacagttgttatgagctgcctcacggcgggcgccgtcgggctcttacttgggtacgacatcggtgttacaggtcagtggctagtaaactgaaaatctgaatatgccttcagagcttttgactctgcatgtttaattcccgtacatggcacggtttatgcttctctgtttctttcttctcttaaggttacagaagatttatctttattaccgtagggctttcaaaaaaatatcttaattaccgtatgtttatgatccatttattactcggattaaagtaagaaaagcaatacatagtttgttctgaaagttcagggattctgcacattttctactcaggagatctggttatcagcaaaggaaataacaagagtgtaccacgcagctagagtttcaaagcagttgcttttcatcataatatactcttttttttctaaaatctagcaatctagatatatccagatttctagtagtatgatgtgttaaattcggttttgtattgctatattttaggacagatgaatggagagtagtaaggttatgcacatagtgattatgcataaaatcccgtgcataaattaggcatatgctcttatattaatgtaaatatataacatggactctttataatgtttgtttagttgtttttattttgaatttcagttattttctatattgtattttacttcaaccgtcactatatgaacacacagctcaatttaatatcactttttctcggaaaaaaaaaccttacaaatttatatgccttctcacgatctcattgattcattgcttatctgaacagttagctagtagtagcaactactattattgatgaaaagtacacgacaagataagattaccttctcttccaaaaaattatataagataccttttttgaaaaaaaaatggatccgatatttgtttacactccaattttcttttctgttagtcaacactacagtctcaagactcaagatgatgcatgcatgtcagttgacgtggatatatcatactacatctgtcccaaaataagtacacccatggatatctgtgttcaatgtttggccgtccatcttatttgaaaattttagaaaaaaatttaaagaaaaaagatagtcacacataaaatactattcatattttatcatctaatagcaataaaaatactaatcataatttttttcaaataaaacgaacggtcaaacgttgaacgtgaataatacaaaactgcatttattttgggacagagggagtatatgccagtatacataatgaatgcaattgtcttcattcagacattccctgcatgtttcgcacaaaacaaatacattactatccatttcagaatacaatttggattttttttatgaaagaaacaaaaaccatgcgaacacatgaacatgcttcaacattctttctatcttgtctaaccttcaaaattatgtatagatgaatggcagaatgatttgtaataattatttgagggtatgaatgaattagttaaatattatagagctaaaaaatgaatttagaagaatttactaagaaaaatccatgtctagagagttttttttttttgcgatcgtaccatttatgagctcataaagcttgcatattatatgaagtctcatccatgtgatatatgtcatgcatgtgccgaaataattcaccatgacaaaacctctttggcttcctttgggttgaaaatccatggggatacttaaggatacagatatcagaattttccctactttggtagttaggaacataatattaaaattaaaaaataatgttttctctatgcctcaattccatatggaaaatagaggagagttcaaatctatttttttttacttcagaagtccacggttcttctctctctagcaccaacccccacccccaaacccacataccctcggattcatcaaattcatatataagccactaaacaaaatatttttcaaattcctgtattttgaatctctgcaggatttgcttgtaattttttaataatataaatgtattacatatcggccacacatagctaataagttctctaactaaataaaaaaacacaagatgatcggtaaaatttcccaactacccttagagcaccacatgatctgcaagtacaaaacatttcaattatgcattgtatttctttatttttaaaatcctactccatccgtttcatattataaaccgtttttaatctttgatcaagtttataaaaaaatatagcaacatttatagcaccaaattggttttagtacatctagcactaaacttattttttatagtttctttgttttatgctgaaagtattgctatatttttctataaatttgttaaaactaaaagtttgatttaaaaaagttaaaataacttataatatggaacatgaatagaaatttgatcaccatatctcgtttaatgttgaattttcaggtgggttgacgcagatggaatcgttcctgcaggcgttcttcccggaggtcctgcggaagatgtccagcgcgaagcaggacgcgtactgcatcttcgacagccaggtgctcaacgccttcgtctcctccttctacctctccaccatggtcgccagccttgtcgccggccacctaaccaagacgctggggaggaggaactcgctgctgatcgccggcgtgctcttcttcgccggcaccctcctcaacctggccgccgtgaacatcagcatgctcatcatcggccgcatcctcctcggcgtcgccgtcggcttcagcagcttggtgatcgatcactgaccagccaattaatacgttcttgcacacacatacatttattttttttttgtaggacgtgaagtgttcatggtgtttgtgtttgttgctttcgtcgtcgcaggctgcgccggtgtacctggcggagatatcgccggcgcggtggcgcggcgcgttcacgtcctccataggcctcttcgccaactttggtttcttgatggccgacatgatcaactaccgcgccactaccatggcgagatggggttggcgcctctccctcggcgccggcatcgtcccggccctcatcgtcatcgtgggcgccgcgtccatcccggacacgcccaacagccttgcgctgcgcgggaggctcgacgaggcccgagactcgctgcggcgcatccgcggggccggtgtggccgccgccgacgtcgacgccgagctcaaggacatcgtccgcgccgccgaggaggacaggaggtacgagtcgggcgctctgcggcggctcctccggcgcgagtaccggccgcacctggtgatggccgtgctcatcacggtgttctacgagatgacgggcggggtcgtggtcagcatcttcacgccgctcctcttctacaccgtcgggttcacgagccagaaggccatcctcgggtccatcatcaccgacgtcgtcagcatctcctccgtcgccgtcgcggcggtcgtggtggaccgccgcggccggcgcaccctgttcatggtgggcggcgccgtgctgatcctgtgccaggtggccatggcgtggatcttcggcgcggagctgggcaccgacggcgggagggcgatgccgcgggggtacgccgtcgcgatggtggcggtcgtgtgcatgtacgcggcggggctatgcgtgtcatgggtcccgctctcgtcggtggtcaccagcgagatcttcccgctggaggtgaggtcggcggcgctggggctgggcggcgccatctcgtcggcgctcacgttcatgcagtcgcagtcgttcttggagatgctgtgcagcttcaagtacggcgcgttcgcctactacgccggatggttggtgatgatgacggcgttcgtggcggcgttcctgccggagacgaagggggtgccgatcgagtccatgggcgcggtgtgggcgcagcattggtactggaagcgctttgtcaagctggcaccggccaagcaggccgatgggccagaatgatgcgttgggaatcgggtttcgcggcacgtgtccatgcggtggtgtacctaggatttcgttgagcccggggccgagcgtaatggttgttcgaaaccataagcgctactaggtgtaagatatgcttgtttaacgttaactagctggtggcccgcgcaattgcgtggctaacacctaaacaaaacatatattttttactatgattttacttaaaatttattaaatagttatgtcattgtcttaagattttgaaagaccaaaccttatcatttctgtgtttctaattatatagtttttaaaagtcacaccagctactaccccttatgtcatctccttctttatttactttctttatctaccgttatttctattcattcttcttgtaacctttaaaaattagatattatagtttttaaagtttataggctttaaagtttatagccacgttgggtttcgtttttataatttctagatgtctcgtcaaacgttgccattatactcctctacggcccgtccaccgtctcttctctctattgtcattgagatttaaaattcgaacataattattgtttgggttcatttttacttcctacttttcaagatgtctcgccaaaccgtcagcggctttgccattatactcctctacggctcgcccgctccctcctttttttttactttttagaagtttcgaacctttaaaaattagaccttttagtttttagagtttattgtcttgttgggttccattttttataatttttagaagtcccgtcaaacgatatcactatgctcctctatggcctgtttgccgcctactctttattggcattgtgattctaaaaatcgaacataactatcgttgaaattcattttttattttctggaagacccgtcaaccatcggcggctctgcaactatactcctatacaccccgcccgctccttcttctttttattgtcattgattataaatggttttttttaactttatagaagtcccggcaactgtcttgcttgtttgtttcacggcctgtctgtcatccctccttttaattgtcattagaattctatttggtgttttattaacagtttttatatgtcgtatcaactcataccactctactcctttataagcctgttactcaatttatctggtcatgtgttttagatgttcttttctctcaatagtcgttattttttatcaaaaatttgagttatttataaattatattcctaattgaaatcttatttttctttttataatttcagaattttttttccaaattttaattaataccgtattgtgttcttttaatatttttattttttattttcaattttagttgtttcaaaattttattcctacttgaactctcttttaattttttctaattttgaatattattttttttattcttaattttaattaatctcgtattggattcttatatgaattcttctttcaatattgcttattttcaattccgaattttagctaattttaaattgtattcctacttgaactcttcttttttttctaatttcggactttatttttatttatattctgaattttaattaatctcgtattgggttcttatatggactcttcttttaatatttttaatttttaatttcgaatttcagctattttaaaattgtattcctacttggactatcattttatttttctaattttagatttattttatttttatttcgacttttgattaatctcgtattgggttcttgtatggaaacttctttcaatattgcttatttttaattccgaatttcagctatttttaaagtgtatttctacttgaactctcattttcttttgtaattttagattttactttatttttattctgaattttgattaatctcgtattgggttcttatgtggactcttcttttaatactccttatttttaattccaaatttcagctattttaaaattgtattcctatatggattatccttttctttttctaattttggattttattttatttttatttcgaattttgattattctcgtattgggtacttatatggaaacttctttcaatattgcttatttttaattctaaatttcagctatttttatattgtatttctacttggactctccttttcttttttttttctttttctccgattaatatgagaatttctagctcccacagtgaacgtggtgcctactttcaaagctgttttaataataagatagatagatagatagatagatagtgttttttgttggcttgttgaagatttctggtttgctttggttatttgtatttattgacatgacaatcggcagagtttgattaggatttctaaaagcagtgtgaacacacggattcctgtccgtttcagtgtatagtatgatttggttttcctttttgactgttgtccgattcgagtggcttagtatgccttttttttccctttcttcagtttttaactaatcctaattctagtctagttctatttttctttttttttattttttttattaatgtgagaatttctaagctgtgagagcgaacgtggaggctcttttttctattaatttatagatataatagatttggacccataaatataggaataagttcatcttaaatccctcgtcttgatgccgattttaaagttcgtctctgaactgcaataccagtataacacgtttcacatgttgtaaaatcggtatactcgaggttcagaggtaatatagtgccctggtttcggttgaggtaatggctgagtcatcgtaagacccacatattaaggcaattcagtctaaataaaaaatcaaaaattgatggagcagatatatatgtaagtgacagtacattctctccttctccctttctttgtttgccttagcagcgtcggtggccgtcaaatctccaccatgacggccatgccttcgtctcgacgctgtcgttcgacctctctgtcgacgccaagcccaccatcaacccgcgctctccccatcctcctcctgatgatcgattgatcccgcttaattactacttgtaactgacctcgcaacaggtagcgttggcattggagacggcgacatggaggctgctggaggcggaggagcgactatggaaggaaatctaggagctgcattggcaccactccactatacgtgctagccttgctcatggtgccgaccatcttgtctacgcttgttgctcctgttcaacatggcgagagcattgcttgcgccgtgccctcctcctctggctccatttgcctcaactggcaccagggatagagaggacgtcgacttcttcttcttccccttcctggtcctctacaagtgcggtcgcttggtacagttcattagcacgtacatcatgacagcatccctggacccggccaccagcatgccatccaaggactacttgttgaacctcgcatgccatccaaggactacttgttgaacctcgccaacctcacggcagggaagcgcagtggcaacaagttgctgatcgtggtgttctaccacagtggtgcgttcaccatagagttggtctcttcgccgatgtaccagtgaggtttgttcctcgtctaggacaacccttatggagacatcgtgcacaacaaagtgatgcacaccggcagggagggggctgcacggcgacgcgaccattagcgacatagctctcctcgacccttacttcaaaaaacgcgaatattagagaatgatctaatatcaaataattagaaggagtgaggcttcgaacacaggtcttctagcccaccaccttgtggagctagccggaagacctatgggtgtttctctcaacccttctactaggggaagcagccggtgttgtcgaagacgcaggactcagttttacggttacggctgaaatttggacaatgttgagggaggggctcaaaatagacatttttctttagaaaaccctcgtgtcgacaggcccacgaggatctgatggcccaccagctccaatttgccccctcgtatggagatctcgtcctgctgatccgttaattccatctcaatcgatcgtattcaggagatcatgtcggagttggactgcggtaaggcggcgatccacacaaacatttggttgcaatataatgcaagttcctttcttttactaattaccatgtaagtctgtgtgctgttgatcttttctacatatcctgatcgatcaatgtcatgtgtgcgagctcgatctctttacaaagcgagccggagtagctattaatttgctgcaagtttaaattaagttaggaatatgtatagttgttggttgcagcatggctagatcgatctggagctgttcgtcatgcaaaaatgccatctctggactgaaaccgagctgttgcgcgccccgtgggccgtggtaaaatctatctagtgcgcccgtaccatttggtcttatctagcggccctttcgtaaaccatctgatcagttgatgatggagatggagaaatgatttggctagttctatgaggtggtgggctagccggtccgaattcaaaactccgttccttttatttatttgatgttagatcattctctaatattcgtgttttagttggtgatggatagcatacgaacatgtgaatgttgtactgaccaagaggtagaaacaaggccggaaaaagaggatcacatactatatgccagctatatgtcaattcactagtatattttctttttttatatagaatctttgatgacctatattaaatatagatcgcatattgtttttaatatccatttaaaccatcatattctacttaaaatatgtgaaaaaataagtctaatattgaatatactagaatatactagagaaaatgtccgtgcgctgcaacgggtgaaggatatttttttttacaaaatcataagctataattaggagtctgatcatctcaaattagcatacgagaggttggtcaaagagatttcttatacaactctttctgtatttctaaaagcgagaacttaaaaaccgactcaaatacggatcgctatttccaaaagcgaatggatttaaaaactgactcaaacatggatgactggatttaaaaaccgactcaaacatgaatgacgtaccaaaatactgacaaaaacatcttcaatctatctatctatctatctatctattatatactaaaagtccattaaacttcctataaacgttctcaagccgccacgtggcacttctacaaacgctcctagaccgccacgtggcaatgtttaatctcaccatcgattttcacttaaatcggtggacccaataatttagaccattagattagattagatgtattatatatttaaaaagaaacaaataccttactgttcaccagaaaaagaaaacaaaagcacaagtactgcatatatccatatataggtacgtacgtagtacgtaaagactaaaaaacaataaagactaaaaaacaatcaataatcttacctactgttcatcgtaaggaaaaaaaaaactacgcacagacttactataaaaaaaacaataaagccaaaaaaaaaacgtacgtactaccattaaaaaaatcgattatttttaaaatagatttttttactatttaaagataaaacctaatctctataaatttaagcaaatatgactatcgattttgacttaaattggtgaatctaatattttaaaccattagattagatgtattttattttaaaaactaataccttattacgctgtgtacgtaaacgggagaaatatataactgttaggcttggaaaaagaaagaaaacacataatctcatcgtcgtttttcacttaaataagtggacccgataatttagactattcggttagattagatatattttatttaaaaataaactaataccttactgttcaccagaaaaagaaaacaaaaacaaaattatacactccatattggtacgtacatacgtaagactaaaaaacaataaatcttacctaccgtttataaaaaaaaactatgcgcagacttactatagaaaacaataaagctaaaaaaatatacacacgtagtaccattaaaaaatcaattatctttaaaattggagttttctactatttaaatataaaacctattactctataaatataaatttaagcaaatatcaccgtcgattttcacttaaattggtgaacctagtattttagaccattagattagatgtattttattttaaaaacaccctattactctattactatatgtacgtatacgggaaacataagtagtcagtacgtgcatacaacctggaaaaagaaacgaagtttacccactgtccttcggaaccaagaaaaatctactcacggtggttttctgaaatagtattttcaaaatcacttactataaaaaccataaaaaaatgtgtatcattggaaaaagatcgatggtcttttgaaatagtattatctactatttgaagataaatatattactctacaaatttatgtaaatatacgtagttaaactaaatttatattataaatatgaaatatcccatcaagttctatctcttaacatacaagactaatatatataataattaatgctatgattttttttatttcatatcatattttaggtgtcaaatatcacttgacgaatatacaacgctaatttaaatctacatttgtaaaaatgaaaacaacacaatttagttgtttcattttacaccattagattatatttattattgacaactaatgcaattctcctatatacggatacatgaaaaatatataactgttgactcgaaaaattactccgtacatacagatgattgaaacaaaaacaataatgcttacatattgtctgagggaaggacaaaaaagtacttgtgataaagtaaaacaatcggaagtctttaaaaaagatttttctacattttaaggataataaccctaaaaaacaatttaaggataaaatataataatttcaaatttacacaaatgaaaatataaaatatccaatcaatgattttaagcgttctatcttttaaataattttaaaattatatatccaatttgtgattcagttgtattcctttaaataaataaactattaatatctatagcactaaatacatcacaaatatggagccaacatgttataattaatgttatgattgaaagtgcattaatccccctagtggggtttggtgattaatgacaaatgtggttaatggactaatgagttcattgagtaactttcaggtgcattagtctaaatgtgtggaagatggatgcttggagaccccctaaaagtacaaaatcaaagcggaccggaactcgagaagtgcataggatagtttatctcttgaaatcgagtttttaggaaaaaccgtactattaagaggggttccaggtgatgctctgagatatgtcaagtgctcttagtgtgaaccaagtgtcaagtttccctaggagtcatttttgcttatactccatctgtccaaaagtgcaggtccggaacttcctgtcttccaggtccggaagttccggtcttgtgaatgaactttccctaagtgttatccggaagttcctgtcttccaggtccggaacttcctgtctagttcccagttcaaaattgtgagtaacggctagatgacgtcacctagccattatacatatacagctcgtttccagctcgttccttggctattccactttcacttttcgaacctagagctgttgctagcctctcccaagtgttttttgccttctccactcaatctagagcctaattcttgtgagaaacagagattgagagggagagaagaagatttggagaggtgtgaagactaggaacttgtgtgagcacttggaatatctcgtgggctgtcatctcggtgcttattactcttggagatgatctcctagacggttagatgtcgcccgcgagaatccattgcatattgtggatgtcctgggtaagtttatgaaggatctcctctcctccgaaagggaacgaggtaagttaatgaagttcttgtgctgagattctagaggttttccaagtagaacaacctacacttgtggtttatttctagaagtaggttgagttggatcttggtgctcactcaattctagaaatttgcctaggagtgtttggggttgaaggctgtagatttcctctggggtttttgcacaagtgaggcaaggggttaatcgagacccagctctttggagctcctcaacggagagtaggatcgcaagatccgaactttgggaaaaaattactcttgtctctttctgtaatgtttctgtggatgattctatgatatatcctatgcttaaaatacctgtgcaccatcttgtgaagattggcttagtctcctgtttcgaaatttgaatttcacctctgttctgttacccggaagttcctgtcctagaacaccggaagttccgggcctggaaggtcggaagttccggagttccttaccaggaagttccaggtctgtttgaattttaccgctgcaatttgttccaggtctgtttgaattttaccgctgcaatttgtttttaagtttttagggacagcctattcacccccctctaggcttcattagcacgtttaattgatatcagagcgaggtgctcttgattcaagcttcaccgctttgagtgatccatgatgtcggacttagggggaaagaacggggaaaatggaaatgaagatggagcgagcagcaagggaactccatcacccaagggagctactataccttttgattacagcaaacttaccattcccccacacaacttcgtctctgtgccttccgggcgtgctcctcaatttgatgggacacattacgccgcttggaagcacaagatgaagttgcatctaatctctttgcatccaagtatttggaaagttgtttgtacaagtgttgatgtaccccatgatgacatggagctcacttcggagcaagaacaactcatccaccgcaatgctcaagcttctaatgcaattctctctgccttgagtccagaggagttcaacaaggttgatggacttgaggaggccaaggagatatgggatactttgcaattggctcatgagggatcacccgccgttcgtgaggccaagattgaattattggaaggaaggcttggaagatttgtgatggatgacaaggagacaccacaagagatgtatgataggatgatgatccttgtcaacaagattaaaggacttgggagtgaggacatgacaaatcactttgtggtcaagagacttctctgtgcatttggtccaagaaatcccactcttgtatcaatgatacgggaaaggaaagacttcaagagactcaccccaagtgacattcttggaagaattgtgtctcatgagatgcaagaagaggaagctcgtgaagtgaggcaaatggtgaagaatgccgccatgatcaaaaatcaagaagttgctttgaaggcaaaacaagaagaagagtcaagttgtgaagaaagtgaagatgaagagatggcttttattgtcaagagattcaagcactttcttcgcaagagtggctatggcaaagggaggaaggatgatgataagggaaagaggcaatcaaagagagcttgcttcaattgtggcgaatatggccacttcattgccaattgtcccaagtcaaatgaagctaaggctaagggaggcaagaagaagccggagcgtgctcatgtggcggaggcacacatggcggaggtgtggtactccggagatgaagaagatcctgaggtcaagcccaagcccgagccaaaagacaaggttgaaggagaaggtggtgttgctaccgtcgccttcaagtcatcctcttcaagcaaggagcgtctcttcaacaacttgagtgatgacgacgacgactcctaccactactcatgcttcatggcccaaggccgcaaggtgatgactcaaaagccctctcacacttctcttgatgttgattctagtgatgaggaaagtgataatgaattagatgatgtgcttaagagctttagcaaacccgctatgcaacatttggctaagttaatgagagctttggatagtaaagaacaatcactcgaaaggcaagaagaattgcttattcttgagaagaaaagaaaccttaccttagaggagagcctagctaaagaatgtgctaaaaatgaacaattagctaatgagcttaatttggcaaatggttctctagctagccttacggatgtcaatgaaactcttcaagataaatttgctaatttagacaaaagtcataaatatcttgaagttcaatttgacattctttggaatagcacttataaaccaaatgtggtttctaattcttccaacccatctactagcaatggttgtgctaggtgttacaatgttgatttgaactcttatgctactaatgttgatgctatgcaagctcttaagaaagagaatgagaggttgggcacattggtgaaatatggatgcatgaagacataccattcaaaagatgccctttacaagaccatcaccgctcatcctaacaaggatggacacgggctcgggctttctggtggaagtcctgtgtctaagcgtgtgatggtaaatgggaaagaatgcttgatgtttgtgagagaaggtaaagctccacaagcaagtgaggtgacttgccccttcactagtcagacacctgaaagttccaggaaaaatgaccggaagttcctgccctgtaagacaggaagttccagacattttgtcaggaagttccgggcttctgataagccgaaggggctgaccggaagttccgggtataatgccaggaagttccagccagagggtctttactatgattcatatgtaatttctaaaaattcagaaggcaaagtggttgcttattttaatgggaattacaatgatgagtaccgcacttgtgtgtgggtgccaaaggctttggtgactaacatcaagggacccaaacttagacaagtttgggttcctaaatcccaagcttgatttcttttgtaggcatactcctccggtggctcaagatgggttgtggacagtggttgcaccaatcatatgacgggagagaggagtatgtttacaagtcttgatgaggagggtggaagtcgtgcaaatattgtctttggagatgatggtaaaggaaaggtaatgggtctcggtaagattgccatttccgtgtctcaattatccgtgtctcaattgtgtaagttaggatttaattgcatgtttaccgatgtggatgtgattgtttttaggcgagatgactcttccatagcattcaagggtgtgttaaagggtgatctctatctcgttaatttcaacgtggatagagtgaatccggaggcatgcttgattgctaaatcctctatgggttgactatggcaccgtaggctagcccatgttggaatgaagaatttggcatctcttctaaaaggggaatacattcttggtctatctaatgtttcttttgagaaagatcgtgtgtgtagtgcttgccaagccgggaagcaagttgggagtccacatcctataaaaaacatcatgactacaacaagaccactcgagcttcttcatatggatttatttgggcccgtggcctacgtaagcattggaggtaataagtatggttttgttattgttgatgatttttcacgcttcacttgggtgtactttctccatgacaaaagcaaagctcaagatgtcttcaagcgcttcgtaaagaaggcccaaaacctctatgttctcactatcaagagggtgcgaaccgacaatggaggagaattcaagaacactcaagtggaggaatttcttgatgaagaaggaatcaagcacgagttctccgccccctatgatcctccccaaaacggcattgttgagaggaagaaccgaacccttattgaagccgcaagggcaatgcttgatgagtacaagatttcggatgtcttttgggtggaggccgtgagtaccgcatgtcatgccatcaaccgcttgtacctccacaaaatcctaaagaaaacttcatatgagctcttgagtggtaagaagcctaatgtttcatattttcatgtctttgggagcaaatgttttattttaagtaagaggcctcgctcatctaagttctcacctaaggtggatgagggattcttacttggctatgaatcaaatgcacatgcctatcgtgtcttcaacaaaacctccggtattgttgaagtcactagggatgtgacatttgatgaatctaatggctcccaaggagagcaagttgttgtacatgttgtaggtgatgtggatccaagtcaagctataggtactaaggctattggagacatacgaccagtcgagacgcaggatgaccaagaagatagggatcaacctccgtcattgacatccaatagccttacaagtgctgtgtctgctgagccggaagttctgggtcctattgaccagaacctccggacatctccaggcccagaagttccgggttctacaatccggaacctccggaccagtggcagtgaagacgtgccaacggcacaagtggatgggatcaatgctgcgggcactttagagcatactgatcaggctcaggtccccccaatgcaccatccaaggatacatgacagtgtccaaagagatcatcccgtcgacaacatacttggtgacataagaaaagaggtaactactcgctctcgtgtcgcaagtttttgtcaacacttctcgtttgtctcttctttggaaccaaccagggtggaagatgcgcttggtgatccggattgggtgatggccatacaagaggagttaaataacttcactcgcaaccaagtatggactttggtggagagacccaagcaaaatgtcatcggtaccaactggatctttcgcaacaagcaagataaacatggtgtggttgtaaggaacaaagcccggttagtttcgcaagggttcacccaagtcgagggtctcgattttggtgaaactttcgcacttgtcgctcgccttgagtcaattagaattcttttagcctatgccgctcaccatgatttcaggttattccaaatggatgtcaagagtgcctttctcaatggacctatcttggagttggtctatgtggagcaaccactggggttcgaggatccaaagttgccaaaccatgtgtacaagctccacaaggcgctctacgggctcaagcaagcccctagagtttggtatgaatgtctccgagattttcttttgaagaatggttttgaaattggaaaggcggatactactctcttcactaaaaaatttaagagtgatttattcatatgccaaatttatgtcgatgacataatatttggttctactaatgcctctttttgtgaagaatttagtagtatcatgactaaaaggtttgagatgtctatgatgggcgagttgaccttcttcctcgggctacaagtgaagcaagcacaagagggcaccttcatctctcaaaccaagtacgtgaaagacatactcaagaagtttgggatggaggatgccaaacctatcaagacgcccatgcctactaatggccacctagacctcgacgataatggtaaatgtgtggaccaaaaggtatatcgctccatggtaggatctttactttatttatgtgcatctcgtcccgacatcatgcttagtgtttgtatgtgtgcccgttttcaagcggagcctaaagagtgccatttgattgccgtcaagagaattctaaaatatttagttcaaactcctaatcttggcttgtggtatcctaagggttgtgagcttttgggctattctgattcggattatgccgggtgtaaggttgatagaaaaagcacagccgggacttgtcaatttcttgggcggtcccttgtttcttggtcctccaagaagcaaaattccattgctttatccaccgccgaagccaaatatgtcgccgccggttcttgttgtgcccaactcctttggatgaaacaaaccctaaaagactttggctacaacttcaccaagatcccactcctatgtgacaatgagagtgccatcaaaatagccaacaatcccatccaacactcaagaaccaagcacatagatattcgccatcactttttgagagatcatgagactaaaggagacacatgccttacccatgtgagaaccaaaacccaattagccaacattttcaccaagcctttagatgagaaaagattttgtgagctttggagtgagctcaatatcttagactctcgtaacattaggtgatgggtggttggctacttcataaccaaacacgtatcactaaaatgtaaattaaaaaaaataaaaaaaaattgagcttttgtgtcttgagatcacttcttgtgtagaagatggtcttgataccaggaataaagctcaaacattccctctcttatccaaaaaccccttttgtgaaaatttgcgaaattttttttgtgtgtttttattgtgaaaatttggtttttatccctttcttgtgatgtatattgaccattgttatgtaatgttgattgttggctggtcatatgcatcataagtctctatatgtccataggtttctatttcttttcattgaattctcatctattcctttgaacttgggcctgactgccctctgttctgtcaggccggaagttccggtcatcccagtccggaacttccaggggtcgggggtataaatacccagggggagcccgagcctgccatctctctcctcacttcttctcctccccgattcccaaaccctagccgccgctacagtactcatcttggcgattttcactttcaactgtggaaatttgattcctctccatggaatcaaccacattggtggctaggaggatcatcccgcgatcgatttgcaacttcctctctcaaggtagcacttttaatcttctcttttggttcatcatgtttttgccccgatctctaaatatgtgaacctagggagaaaaccttttggatagaattgttcctgctaccttgtagattgccgatctataggattttgtcacatgcactagcctgtttgaatcctctattcttcagttttgcaggccggaagttccggtgttcttggcccggaacttccggtctctgtccagccagccagcaaccttgattcctctactgtttcttttaaccattgcactccaaccttgttgattcttgttgcagtggtcagtatgcctcgtgagaagagacagaagctttcgcaagatgttcctgctgactcgagccccccggttcgtggtcctagggggagattgggcaaagaaaaagttggagatttttacagtgggagtcatattccgatccattctaggagggctggtagcattgtcattcgtgatgctccctgctctccctctccagctgcatcagagtcagatgatggtggcaatgaggatgagcctggttctgaaagcaatcctttgaggctgtacaagacaagggctgttgatcctgatccaagatggccaagagtgaactatttgaagaatctgctcaagtatggaaaggacagaatggtgagtcctgatactctgtctgctgactctcaggatgacagattcaggaccttggtgcaggttgattggtataactctgtgatcatgggaagatctcatccagtggaagagatgaagtggctagactagcagtacatgtcctcaaagaacaacatagttttcaatgaggtacgcaaggtgtgtgagcgcaagcacgtggcagatttgttggccttgcagtattccgggaatgaggaagtgattggacaattctactccactgttttctttggcaccaccaagaagggacttgattttgtgaagtggaccattcaggggcagcagtataaggtctctatggcacagtttgctgcagctttggggttagatgatgatgacctgagtcgtccacatatctttatagaggatgctctgtcaccgactagcactaccttaatgtatgagaaggatgctcccaaggattgtttggggactactcgtgggttgcgtccatactatagagtgttgtactctatcttcaggtggtctttgctccccaaagtgggagatgctacaactcttccaggtaagcatgcgctcctccttagtcgcatgcgctacaacaagcctgatttcagcatcatgaagcttatctggattgagatctatgagacagtgtgtgagccaaagaggggttgcatctatgctccttatatcatgaagatgattgaggcaaagactgggatttgttatttcaaggacaatcaacacaagcctttccgtcctcatgctcccactacttcagctactccttctaccagggtaactcgtgcttccacctcagctgctccttcttcctctgctgcaccacagcgttctgagtcttcttctccgataaagaaggctgtcagggctatcttttgtatgtgtgccaagactgctaagaaggtaaaggaaatagagaggcatcagaaggaaaattggattgcagcaggcaaggatgtctctaacatttctgatgatgaggagtttgttgatccttttgctgcttatgagactgctcgagacattgctagtggtgagggtccctctggcatttctcatttcttcaatgaggagtcctctcactccgaggagagcagcgatgatgaggagtctgatgcacctactgagaatgtaccaacagatccagatgaggtagtggatgccgccgggcaagacatcgactctactcactccggcgacaccgagatcattccttcttatggcgatgatgatgaggcttgatcctcttctttccttgtgattttgtctccttttggtgccttgatgccaaagggggagaaaattgcaatcgaagggggtcaaaattttgtttttgatgcttgctgcctgctctgtctgtttaatccggaagttctggatcctcttatccggaagttccggacctggcagctccctcgctttatattcatgtcagcttatccggaagttccggtcctggcagtcctttggcctctactcttaagatcttatggacatgtaataattctctatttgtgtggatgtaatgactgttagatactcttagcagctctttatttatactacacttcttttatgttatgagtgtcttatttgttctttgtgatgtgatgttgattttatccttttgagtgctcaccatgtcgtatcttttgcatatcatatctattcttactgcttatttgcatcccagatgaaggaaactctcttcggttgctcccattaatatatgcatatgagcttcactcatatcttccatatgcatacattaagggggagtttcattcacctctaaccattcaaaacaaaattcttatcaatcttttgtaagctttaaccatgttgtcatcaatcaccaaaaagggggagattgaaagtgcattaatccccctagtggattttggtgattaatgacaaatgtggttgagggactaatgagttcattgagtaactttcaggtgcattagtctaaatgtgtggaagatggatgcttggagaccccccaaaagtacaaaatcaaagcggaccggaactcgagaagtgcataggatagtttatctcttgaaatcgagtttttaggaaaaaccgtactattaagaggggttccaggtgatgctctgagatatgtcaagtgctcttagtgtgaaccaagtgtcaagtttccctaggagtcatttttgcttatactccatctgtccaaaagtgcaggtccagaacttcctgtcttccaggtccggaagttccggtcttgtgaatgaacttttcctaagtgttatccggaagttcggaacttcctgtcttccaagaccggaacttcctgtctagtttccagttcaaaattgtgagtaacggctagatgacgtcacctagccgttatacatatacagctcgtttccaggtcgttccttggctattccactttcacttttcgaacctagagctgttgctagcctttcccaagtgtttcttgccttctccactcaatctagagcctaattcttgtgagaaagagagattgagagggagagaagaagatttggagaggtgtgaagactaggaacttgtgtgagcacttggaatatctcgtgggctgtcatctcggtgcttattactcttggagatgatctcctagacggttaggtgtcgcccgcgagaatccattgcatattgtggatgtcccgggtaagtttgtgaaggatctcctctcctccgaaagggaacgaggtaagttaatgaagttcttgtgctgagattctagaggttttccaagtagagcaacctacacttgtggtggatttctagaagtaggttgagttgaatcttggtgctcactcaattctagaaatttgcctaggagtgtttggggttgaaggctgtggatttcttctggggtttttgcacaagtgaggcaaggggttaatcgagacccagctctttggagctcctcaacggagagtaggatcgaaagatccgaacttcgggaaaaaattgctcttgtctctttctgtgatgtttctatggatgattctgtgatatatcctctgcttagaatacatgtgcaccatcttgtgaagattggcttagtctcctgtttcgaaatttgaatttcacctttgttctgttacccggaagttcctgtcctagaacaccggaagtttcgggcctggaaagccggaagttccggagttccttaccaggaagttccgggtctgtttgaattttaccgctgcgatttgtttctaagttttcagggacagcctattcacccccccccctctaggcttcatcaccgcgttcaatgataataatttcacatcacattttagggtaagaaaccacttgacgaatatataacgctaatttaagtgtatagatgtattatccaaattactaaaggtgtctcatgtgattagaacaataggtgttgaaaacaaaccggacactgaactaacatgcactaccctatagatatttgtcaaagtatgataccgtactttgattatcgtggtagtatttaaaaaaaatcactttctctcagttacatataaattcttctattattttgggataaaagttaactccttcgatttatgtgacggaggtaatataagtaatataagtctatgtttgattagataaagtagtatcattagctatatttttaatagaaaatatctttcattaatatatagtaaaattaaaatgttacttaaagtcatcaataacatacacaataaaaaatgttatataaagttgggaaactccaaaaatttaaaagaaaaaatcacacataatacaaatagatattaactaactctattattgtgacatattttttctaataaatttgaggatatacattttcaagtaatacgcccaaaccaggtattaacgaaaatacgtttaaaatagagtcaacaaatatttcaaaaatatgatccacacataaacattcgcaataaaagttcaaacaagattaaacaacatgcccgcgcatacgcgcgggctaccttcctagtttttataataagtacatatacatattagactagtgaccaatctataagtgcttgttgctatttttagaagctaaaggggaatttatacatgggatgaagtaatcgttgttttaactaaataagcggccgtgctcagtgtaatcgactaatcgtatccttttgctaccccagtttctaatatagtctgtatatggggccacgagtgcggttttcctttccctgtcggtttggttccggaactcaaaatcatttatggcttgacatgagcaagagcaggttatcacacttccaaatctcaccttttgttgttgaactaaaactcaaaatataacttttggttgttccacttccttaatttctatgcatgggagtttcaaattgtttagggtgtgttcgctatccatggatcccaataggaacccttcacacagaaaacgaagcgatccattagcgcgtgattaattaagtattagcttttttttaaaatagattaatttaattttttttaaaagccactttcgtatagaaactttttgcaaaaaaagtgcatgtgtttcgtggacatcttataaggaagatatgtgactaaaccttactctgtgtcatgctaagttgtggagtttattcggctttgaacatttggaggtgactgttgttgtgggagatctgaacacaagtgacatgtggtgcttgcatgattaacatatgactaatcaagtattagtttaaaaaacacgaaaaattattatggctgttgaaaactacttttctatagaaaatattgaaaaaaaaccatcactgcacacacgaaaaatgaagtagaagttaaaaaaaagagagaagaaaagaacactggcttaacattgacaacattgagcacaacaaatgtgtcgtaaaatatggtgtaattttacggttcttgagaaaatatatgtagataccaaaactttacagcttgggatatcaagttttctagtagaaaaaacatggtaaacctatgaagttttataatacttcctccattttatattataagtgattttaaaagaatgtgacacactctagtgctacgaatataaccagattggctagtccctctaaaactctttatattttaggagagagagtagaaaaaaatatgttgaaccttctcaaagaatgttaaaattacacttagttcaacgtcaccgtatttggtcgatgcactgaatgattgatgtctactccctccgtccaaaaaaagataaaccctagtttccatgcctaacatttgaccgtccgtcttatttgaaaaaattatggaaaaaattaaaaagacaagtcattcataaaatattaatcatgttttatcatctaacaacaataaaaatacgaattataaaaaaatttcatataagacggacagtcaaagttgaacacgaaaacacaaggtttgtctttttttggacgaagggagtatgtctgtcagctactcagctttcattgccactaatctgctgagttttcagcacagacagattgaagcaagattcgcattaattaacaaagccaatgaaaagcctaaatcctccaggattggtcagtcaagacgaactagtgccactttcaaaaaccttagaaaaagggcaacaagaactagcataacatttgttaattgcctcatagtcgcagaaactgcttgggagaatctacactgagatagcaaccaatacaaaaactgtacagaacaggcaaagaaaatgagcatatttacatccatcaaacgctagcagtaaaacgggcagacatctagccatctgtcccatctcttctcttgagatcctagtttaaatcaagaccaaatccacattgcgtagtatgcaaggatggcgttcttcagccggcacagcatcagcaggaagtactgcatttgcacgaagcagagcccgaaacagagacccatgccgataacctgcccagctgactgaatcttcataccaggaatagtgcagaacaatgagccccatgaccagctgagaccataggagacgacgcatgtgagcaggaatgtcgccgtggtgtagcccgtcagtatccgagttccaccgcccagcccgatttgcgcttccacaagcaatgggattgtgatcttgcaaattataatttcaaccatgaacagcaatttttttatgtttagtacgcacagaaacatagaactgatgagaaaatattggagatttttttcctggtcagttagttacctggcaaaacaccatcagaatggcgctcacggtgaatgtgacctcccgtccgtggtgctttgttgtgaagtcagacccaagaatgccaaaggagttcaccaaaacaatcacgatgttaccgacaactgcagcattgcgctgggagcttgttgtctgatatagcattggcaggagcagagtggtaatgttcgctctgctcagttgtaaaaacagttgtagtgtcactagtgccccaatataagtcagatattgctcatttgttgataagatcctccaaaatcggcctctctcggtattcttttgtttgcacttcccatcgaaaccgatctgttttggtgttgtataaacctttaaattggcagtgctgcaaataaaatgaagtgctagacggatacaatcatgcttgctgccaaggaaacctgaatcgagggtttgcttattgcacaattcagtgtcttgaatgaacaaatccctccgaaggttagcgtcatggccagcgcagagttgtggggaataaatatgattgtgaatcgtaacgtagttatatatcctggctgtcagaacactaatgccaacaaagaaaggcaaggagctacgtcgacataaggatcgcaatatcatggcacaataaattggtgcgccctgtcacattgtcaagttagaaacacattgggttagggcgttaggatgaacagaaagaagtagtgctggaagtgaattaaggatctcttgaacaatatttagatactaacctggatggcagaaaacttctgcagtaaccatctgtaaatgtgagccttgtagtggagggcaatagtccaaatcgcgcttccagtgaggaaaacagaacgatctatcaacatggcaggctggcgccgcattatgcgggagtctacaccggcattatccgatgacatgtcaaacaaatgtgcataatttctgtacaaggactgaatctcctgctttgcctcgggaatgttagggaagaaggccatcgcgtatgattggatcccaaacacaccagttctgctacttgtactccctacaaactattgtgcctgatgtagcaagagaaaggcataaattttctgaagagtagaaaatctatcaatctaaatggaaatcatagtctcctctgttttaaactactaatgctcagttcaggtttttgtctcgtcggctgtttcggcaaggagtcgcatcctcagcgatgaattcagtcttggtgcaagtcttgttacagaattttctatcagaacctcatagctagctaactactacacatttctgaacatttggggagaagaaatttcacaagagaaccttgggttgcgacatgatttggtaacagcaactaggaccactagtagatcaagaaaagattggaagatggcattattacaattataaaggatcagtggcatgatagtagaagatatttttatgaacacaggccactgaatgtgggcccctacgcacagaactcccacgtgactcttccctgaatctaaagggagatccaatcatccaaacttgaggccgagctgcaccgaggagtacagtgcgtgtccccttgctgcagaaccagagcaacaagagccacatagctcaagattccatgggccaaacacttgtaccctttctagggttgaatacttgaatcgtcttccacgaccattttgttataaaaaaataatccaattttgtttccaatcctttttttttccaaaaagtttggaggataagctaggcagcgttcatgaaagtgatggacaggggtagatgtgcaccatacggtttgttctacgacggtatgggtggctacagcgtcaagccagcgacctgatcgagcacgcgacgactaataaaatatatactttctctcaaaaaaaagaaatgattagcggcgaagatccaaacgtgccatttggcacaaaggacaccatttcgattgccatctgaaatttccactgcgtgacacgcggctcatggaaccaaaagcttctcgagagtacatgcatgatcgtagagaatcagaataatactgacctcaaattttctctctctctcttttgtgcatttggggcctttttaaaatgtaaagaagaatggtaatctagacgatacccccatttggccattctccctctagaaaaccagaagaaatgcttgtggttaaaagagtagtactagtagttgcgtttgaaccatgacgtcacgtaccaaacctcatttaattagtccaagcataaacaaagcgagcaaaaagctaggcaaggggatcagatcagcttctaacctgcctgagaggctgagagccttccagaggccgcgtcagctacctcgacagcggcggcgcaccacacccccgcactcgcgctcgtacgttcccccttcaccgtcgtacgccggcggcgagcttctcttccggcaactctcccgcgagctgatggcactccgagaaaactgtcagacaaaacactcgcttcagccgagagcccgagagaatcgaagaagaagaagaagaagagatggatgatgataaaagagaaatgatgcacacacacaatcacctggtgctgcgtccggagctgagctgactgcaagaacaaggagaggagaggtgactgcaacaacgaggagcagagagaggaaaaaggaaagagaggaggaggaggcgagaaccgcgagacagagagagtgagacagagacagagagagcgagaaaggatacgagtcgcgcagtagttatcgcgcaccgaatggggcaaagaggagtcccgttttgacgagtattctagtgggagaaccgggtactcaaacagaaacaggggcggttcgagcgcgatgtgtgtgacggtgtgagtgtgagctgagctgagcgacgagtgtgatgtgagccgggttggcagctaccgcgcgctacctatctcagctagcagcaagtggacgcgcgcgcgggggtggggggtttcgatgggcgcgcgcgcgggggagtacgtgatacactgatacgtggccgcgggaggccaccgcgctggccgccacgacgacggcgaccagcgaacaacctgacatggcgcggacatgtgcacgcaggcagcgcaggcaaaaaaagcctgcgccccccgcggagcagagtggagcaccggcgccggtgcagggctgtgcaggcagtgggcgttactggcgcccccatgcatccgggacggggggactccgtcggccggggtgtccaaacgcattgggaatttgcgactcggcgtgcgtggcggtatctggctgcgccgaatccctgtgtggcccgtctctatgggaatatccttcattctcatatgatcccaagaataaggaggagcaggggaggtcttagagcatgtacaatagcatgctataaaccagctgcaaacatattttaagaagataaataaagagaaagaagagtaacggactaaagatctgtagccagctgtagcacggactccaagacgcagtgtgtgtatgacaggtgggaccagatattaatagtgtagtatgcaactattgtatgaatgagctattagattgactatagatgaattggagctagtagttggttatactattaaacttgctcttaaaaagtactccctccattccaaaatataaggcataactacccttaacccaaacactaagaaataattattaccacctctttgtttgaatcatcccaactgatacaacacatgcacccaatagaattaaacatcttgtgattataggatttaaataataatagttttaggagagatgaggtgctattaattgtcatgcatacatgcacgtcttatattatgaaacacctttaaaaaatagttatgccctatattttagaatggatggagtagtagtagtactaaaaagttgctaatggttcacgttttcggcaagaaaaaaaatgttgattggaaatattgaaattttaaggttttaatgcaatacaagagtagattccgagtgaaatttcgaatggtttttgagaatttgaatttaagaagataaatctgataacactaaattaaaatgttgcgaaaaccatacaaaccgagagttgagatccggcactaaattgaaaatgtgaacctcgcttgctttacttttgggatagtaagctgaaaattaacattttatattctcaccggctaaagctcctcaatcaagggtgccactgcagccatgggaaaggcagcaagtcagcaactacggctgcctcggcgatgttaagggatgggcttgaattgattttgttggggccaagcccgctaaatagcatacacgtccctatttcagttcggcaaaatcaatagcactagtaaaggtggatggaaatgccaatcaaacaacgtgacataccagctcaagctcaagttgagaagattctttttggaagtgggagtgaagaatatctattccattaagatagactcagattgaagaaatcgaccgtatggctttactgctaacacgaactttgttcaaacccaacaacaactaccggacgtaaacaaatctactaactagataggcacacgcaagttcgcttgatttccctcttaacgacggcaacatcagcgagtcagagcagaagatgatgagaagtgaatggtatttgaagttcggagatgaacaatgaccagccctttaggtgagtatgcaacaactaacaaatctcgctcgaatgatggataaacaacagccaacaaacacagactggccacaaactacatattcagaactcttccggcgagtcgtcagaccagcgcgatgctgctcccgccgccaggaggcttcctgacgcctccgaagtagtcccgggaggccaccttcccatcggcgaagatgttgctgccactcatctccttgagcttcgccgtgctcagggacttctcggccgagcctgggggagcttcttccttgaagatgttgttgcccgtcaactcatggaacttctggttatggattttcttggcggtcttgaccgccggctcctccccaaacatgatattgctcggacctccggcaggctacacatgtatcaattatcaaattgaattatgaggttaatatacaccagatgcagaactgcatttggctatttgctattataaaaaagcactacagcaccttatgttccatagcagttaatgcattttagttttttttaaaaaaatactaacaacaatctcatctgaacaactataacattaacatgtggtttattatttaggaaacattaagcctgaaatgagcactctcctaagcaaagagactaaaattcagttgacaatcactattacttgaagattactctcaatttcaaattaatataacattttttaatcttagcaaagatattgcattgagtggcaaaatatatttcatttcacttacattggatactttaactgaagtgtgaatgcttcttggttgtggaagcgcaaaatctaaatttccctgcagctccaggttacgagcagctaagggtctagaaggaatctcaggaggtgggccaaatatatcactcccgctgagctccttgctttttgcttccgagttctgcttcttcaatttagcatcagcttcactctccagtgtaccactcaactctcgctgcttcgccacctcaggcaatgaggaaggcttcttcggagacacgctcccctcagcactaaatgatatctgacttatgccagttacagtttgctgccatgaaaaaaaaggcacaaagatgcacaaaaaacgtttaaaaatatcaaactttctcaatgagatccaccaacaacacaatattactctataaggaaaaagatcaagaaaaactggcaaaatacacttcatttagagtttagacagggctgatggtttggacatttggtactcataactagaggatagttgtatctcaaacaaagtactcggttcagattacagacaaatgtacacataccaaaagcaccaaaagagtgacacatgtacatgtactaattatttgtagtaagcaaggaatcaagaattaagatacctgatacatccttaatgatgtcttgctgggaggattagagtcaccggagccagtttcagaatctccatttgcaccctgtgcagaaaatattccactcccggtcatttccttcatctttgagcccgagcacattttcctgccaccagagataaataagaagatgccaataaatatttaaaaatacaacaatcttaacaccttcataaatgttaatcgtatgcattgtgcaggattcttcttttatgctagaaaagcgtgaaagctaaagctcggacagaaaacatggacaatctgtatatactttccatgctcaaactctcttgtaatcttttctgacaaatacaggattactagcatgaccaacatgtagcaagttgctttggtaagaactagtaaactacaatcttttacatttgaaaatcatatttcctgcttgaaaatcattttaacaggctcgtacacctctgtcaaatatttcccccaatgtcagcaacattctccagagtccagactccagcaacaaagcaagtaaagataaaatctgaaaataacaaagcagtacaacatctagttaccccttagaacatcagggtcacaaagaggtagcacccatggcatctcgtgagtacaagttggcaggcacatcaaggacgacgaaacccacaaccacccaaatgtttaagatggacgtttgcaacccccgagacccttcggcacatcatttcccagtacgaaaaatcacggcgttttgcgcatggaatgccatgcgtacagcactgcacacttggaacctagtagcaagtaacatttctactctgtccatactagcacgagtgtgcaataacagcgtaaaaagaaaaaaaaaacaaatcagtctccagctactagcatgtgaaggtattaactactaaaccaagagaacagaattaaaaaaatttgttaagtcaaacgcttctcagttaattcatctttccttctgtactcattctcgatagagattcataaaatctacactacctgtaacagtatatcatttggaatcacagtgaccaaatactactactacaatctgtgcaggaaatcaatcacccggcgcgcgcagagtgcacgagcatacacggcacggcaacgggcaaaggcgcggatcgagcggatcagggcgcgaataatccctcacctcttggtcagatcctcggcctccaggtcggtcaccggcgctccgaacatcgccggcgtgatcccaccggccggctaaaagcaacacaacaaacagcaaagtgaaggcgatatcaatgtcagctagtactcagctacgagtacgactttggggacgagcgagctagcgatcgatttgttctaccttgaggctgggccgcgaggaaggcggcgcggcggcgcccgccgccgccgcggcattgtcggggcccggcgactccgaccagctgagcaggccggccgtcgaggcgtgcgtcttccgcaccggcaccgccctctccatctctctctcacttcgtctccctcgtttcaagttttgaaatgcggttgcgcccttgcggcctcggcgtggccacccaccgtccattttaataggcgccctcctgcatgctttaatcttgtttatttttacaggacaatttgtacaaagttttcgcaggtgctcgagcgtctagtagctcgctgcgactgacaggtgtgtcccactggggtggggcacgcgtggcagtgaggttagccagggtcgccgcgcgtggggtgatagtatcaagttggaattctatcaggaggtgattcgattgacgtcatgaatttttcttcggtgattaattatgttttcttgattattactgacaactggggcccacgtgcttggttctcttttctgtccagtgattactggttgattaggtccagttcatctctgtcgctccacgccacatgaaaatcttgtcgaggaaaaagaagaggaagaaacaaaccggcgaagaagatgatggctctagcctctatagtcacgatgacatgtgggccccagtagtcagcgcgcaccgctgatccatcccgttccaccgtgagatgttttctttactactccagtactccactagtttagttgagaacttcagatcatgaagtgtttctaagaaaagtttaatagtatagctacctactatatctaaattatctataatcaatttagtaaccaactcatataatatcatataatagatacctataagagcaagtataatacaagactataaaatggttaaatgctgagatggatgaaagtggagagttaagagatgataagtggattgtaagtttacagctggcttagacacaggaaccaagaaaatatgtgagacagacaggtggaccatatatttatagtgaagagttaaccactatatgagtgaagtgagagataggatataaagatctctacagcaagcagttgtttgtattattagccttgctctaatatatactacgcaattcatacttggtcctacatgtcatatatacatatatcttgaaatctgtactgtagctggctataaatctatagcgtgttaatattctctctcctcttttattttcttgaaaaatatttatagctgacttatagtatgctactgtaacctgctctaaccattctatccaaagcccagctaagctatgcgaaaccattaaaccaagcatgcacgacacgagtgcaacttgtatagttgtatgtataagaggaggagtagatcgatcgcacatgtgcacgcagagcagagtgactgacagcggttgcttacagccaggacattttgcgacggctagcatgtggcctgctcgtttttaagccaagtctgcgcagcaaatgctttgtggttttactcaagcctctacttgctcaaccaacactttatcctacagaaaaaaaaaaagaagcaaaatggtccagatttgcatcatctctttgtcgttcacgttgcacgggtacggaatctcccgagcgtaggagcaaacaggggatgtgggtgtagtcagagatctgaaaggaacaattgaaacaacacttattaagaaaaactctaagtatttggttcgaccattgtgccgatgaaagctgaataaaacatgaactcgatatatacagtataaaatcaatttatgaggtccatagaaagaatcaaccaaccaatcagtgtctgccttctatgcatgcatgcatgcaaaacaattttttttaatactccctgagttctatctcaacttagagtttgatttttctttttgtctgacattatgtgtcatctgcgtgcatggttctttttttttctgccttaaattgattttgcattcacgatagagatgctctcatgtgatttagtcaccatttgagatagctaattgatggatggatagacaatttgatttttttagttatttgagagtataaacgaagttaactactagaaaaattgctttaaaaagtatttcaagattcttttgtacatgaagcatatcgttcaaagcttaaaatttgtgcaaacaaaaaccaaaatctacaatcaagaaaaagcggagctttaatttttgtccttcaaatctaactatcagaccatgaaatgaccctatcaagtttctcatttagattatgtgtatagctggttatatatcaaagggttgataaatgattgaccactagaagtatcgaaaaatataacaaattaacatagcccccatatataaatataagtgtgtatttcaagattttcaatttgcgtgcattaattttttttgaaaatataatttatgtttcatatgctaatagaatattcttgtgttggatgttcttttatgtaaatcatctttatttttctgatcctactatcttttgtgtgtgagagattcctctttcatatgccacataaaaatagttcttttaacaaaaacatagaagaaaaatattaaaatatagagccaattcattctatgccatcggcaatgcatgtgttcccactgacaaaactcaatttagaatataccatcgaacaactcattttcttccttatatgccatcgtcgttaatcaaacgccactaagagaggaaaaattgctatttcacaactaggataaatttgaactgagttttctcgatggtacattatagaaatcatgctttgtaaatgacatagaatggattgtctctaaacttctatattatgtaaggctaagaaaaactttcatatgtattcaaaacttctaatgagtcaatcaattggcaaccattgtacggcttgaagggcatttaaggtatttttttaagtattcaccccagtgacatattaataaggttgatggcatattgtatagagagagaaagctgataataaatcattgaactagagtaagagtaaggtatagaatacattatctcaattttatactcactcttcttctgtttcatattacttggtccatacaatttggcattattttatttgacgatttatgttttataaataaaacttataagtattaaaaaagtaccatattattgaatataccatagaaaccctcacttagatgagaactcgtataaaccatgataaaaaaatcgtcaaaaaaaaatctcacgcgtagatgagagtgtaatgaacaccacgtagaaaatcttatccaaatttaacttcatttgtgaggcatgaaaataacaaaattcaagtaaatctcacaaacaaagttgaatttggacaagttcttttaatttacatggttgtgcaccgtcatctcatctacatgtgagattttttttgtgtgattttacgcaacatttttgtcatggtttacacgagtttttatcgaagtgagtttccatcatatatttattcatattattggagtatgttatatgataaatataaatatatcaatatgctcatcgtaatcaaacaatcttgaagatattagtggccaaactaaagcaattgccagcaaaaaaatttcttaacttgttggtcgcccgtaggtaggggagagcgctgacgatggtgcattctggttataataatagggggaaataatacgttagaaattacagcatatatcaatatgaatcatgactgacttcacggtatctactgcatagacctactcaaacttgagctaaactacccaggaggatatacatcaagattatctctttaattaagtcccagcaaaataaggagacccgagatatagatatactccctatgtccctcctttatttatgtactgacgttagtctcttctaagtctaaaatatttccgttgtccgtgcgaaaaaaaagtcacgcgaaaaaaagacggcatctgaaaaaaaaaggccaaaaaaagcccagaaaaaactccgcccaaaaataatagcgaaaaagaagtccaattcgtgcggaaaaaaagtcaagcgaggaagaatacacctagatttttcacattttggtccttttgaaaaacttatttcgtaaatagacccctaaaaaaacttatcccagaaatagtcctttttggggcgccagagtggctagcgccgtcatcaacgggacggcgccagcctctctggcgccgtcctcctgccaccgtggcgcacgcgaaccgacgtggcaggaggagggcgccagcatggctagcgctgccccagggaggagggcgccagcatggctggcgccaccgcctccattcctgtttttctgtatggagttgcaacggtgtcatttttattttattttgtcggatgttttttcacactcaggatcacgatacaaccaaccacaaaaaaaaattaaactcgaactatcacttagctaaatctgaaaatagctagcataccacttagtctactttgcaccttcactaaaattagaccataactcatttagtaaaaccctttgatcagcatgttaaacataatacactctaccactatatgaaattacttaatctaattcaaaatataaccacatgaaatgacatatataagttaaacagtacatagagatgcaatttttttatttttatttcatttttttgatattttttcacacttaggagaacatagaaactaaccgtataaaaaataaactcaaacagacaaaatatgtgacatgtagaattttccaaaactctatcgaaactgacaaaatatgtcatctattaaaacaggcgtaactttatcttacggactcggaatcaggcaaataatatatgcacggacatctacagaaaaagttacatccgattctccgggttcggcaatattaaaacctccaaattccgcttgcaagattgtgttttcgaggagagaagtttttcggtggagctttggaaaattccacatgccacatatttcgtccgtttgagtttattttttacctggttggttcctgtgagttcctaagtgtgaaaaaaatatcaaaaaaataaaataaaaataaaaaagttgcacatctctttcctctgcactagttcggagggagaggagaggagaggagaggaaaaattctacaggttacatattacgtccatttgagttcaatttttctatggttggttcttgtgtgtccctaagcgtgaaaaaaatatcaaacaaataaaacaaaaataaaaaatttccggggggggcgccagccactctggcgcactccccctagccacctcagcatcgccccgccacgtcggctgggggacggcgccagagaggctggcaccgtcctggacgatggcgccagccactctgacgtcccaaaaaggaccatttttgggataagtttttctaggggtctatttgcgaaataagtttttcaaaaagaccaaaatgtgaaaaatccagaagaatacgccatctgaaaaaaaaggccgataaaaatgccataaaaaatagcgaaaaagaagtctgattcctaatcaatgcaaaaaaaatggcgacaaaaaagcaaacaaaaaataaaacaatgccggaaaataaaaaacagctaaaaaaagtctcaatggtaggcaatgcaaaacaataaaaaaaagaaaaaaaaagagcccaaaaaatgcgaaaaaaaaacatccgatttctacaccacggggaaaaaaatacagtccgtaataaaaaagccagcaaaaacagaaagacgtgcccgtaaaaaagacgaagaaacgtacgattgtacgcaaccaaaaaaagcccttcaaaaaactgcgagaaagaaaaaaacataaatttattaatgtgatctaaggaaaaaaaagtccgttaaaaaccctaaaaaagggcgaaaaaaacataaagaagggaaactttctacagttatatttgttcctacagttatttatattatttataaattttcatggtttgttattttataaattttcctagcattttttgacagatatccccacataaaaactttttgccaaatgaatggatatttttagagttgtcttacttttttgtttcttttttccaattcctaatagttaaatgggtaatgaaaatgacctattcgaaaaggctgttaacagaatactgccagctggaaaatggtatgtttgaaaaggatattgacgaagtggagacaaacggaaaatgaagtatttgaaaaggccattaacaaggtagcgtaaatgtaagactacaacggcataatgtgatttttcaattatgaaagaaggctaacaaggaagcacaaagaagtgaagcaacaggcatgtactaagtaatgaattttggcacaaatgagatgatggtaggcgtcaaaccaaatcacaccataatgcaacgtcgtctacggcggaaatccaaaatgcagtgtgatattactggtccttgttgttatcactacagccagttctaaactaaaaagaaacaattgatgtgattaggtacgtactgtctgtaataagaacgttcaggtacaacaatatggtgtaagtaggctaattgatacctcagatttgtatttagttaaagcagagaagaaaggagctacaacctgtactccaagaagcattgtgagataacattggctgagtttccccccccccccccccaattttcccaactcacttccctcttttttacacgcaagcttttcaaactgttaaatggccggtgtgtattttaaaaaaatatatatacaaaagttgttttaaaaatcatattaatatatttttcaaaacaaattagtaaatatttaattaattataagaaaatgtgttgctttgttttagtaagacaggaccaaacattaatggtgtaatatgtaggataggtaactatcgtataggtatgctattagattgctataaatgatatgataatagctagtcaatacttggctttgctattagtcttactctaagttgtaggtcatctcagatgacttcaggtttaggtgaacatgttggatcgcaatcctacccatggatatgggtacctgtgggtactcatgagtccgatggggacagacatttgtctaattggattgctagcctgttacttgtgttgctctttgttaaattatttatttatatatgaagatattacttatgtttagaaaaaaagttcacttggtacctatcaggttatgaccaatgttggcccgacatggatgtcttaatatacgaattcaaggtacaaaccttaatagctcattggaccacgtggctaaacctggagcaagtttgcatctagtgaaatcacgccacatatccagcaaacctcaaacacatccttcggacgaaaagaaaatgaaaaaaaaggctagcaacctcaagattgttctttgcgccaatcaaaaagaaaaatcaactcgttgcgccgcggcctccgcttcccttcctctccacttccggccccacccgacgaccccgtcatcgcgctccacgccgtccacgccggcatcggtgatgtccatcttccgcgccctcccgccgctcccacttttccagcccttgtctcccagctcgcctcactggatatgtgcaatgggagagagtattctaaaaagttcagttttagaaaaggataatacaactcacaatttttctttcaaaacaaaaatacaacccacaatatcactctgaaaaactggaaatgacaaatcttacaatttccatactttgacagatcaatcatgtacaaattagccgagattaaacctgcccacaattttactcacggtcgatagccaaaaggaaagaccaaaggcacatgaacagctcattgattccactcacttgaaaccaggaggacaagtgcgaaggaagacacgaggccggacagcagcaggtgcctcccctccagcttgccgcctcccgaagctaggcgtgcataggaggagcatgagatgaccgcgcgcactgcgcctcctctaggccgacggggcagcacgtcctcccttgccaaccgctctccagctcctacccccaccgcctctttctcgcctctgcctccccgccaacgccaaggaccacgtccccgccctcgagcgtcgcctccatcgctgttgttctccatcacgttgagtgagctaagtggatagaatcaaatcatagggtgatgggttgagaggataagggttcatctttttttcattttagccctttggcttaattaatataacgaaaaatatttgattcaattaatttcttccatataattagccttaaagtttatatatatagttaagattattctttgcataaaaaataataaatatagcatattttaaagatctattgaaaatataaatattttacaaataaataataaatattacgtgcaattactataaatatggtttatacaagctggcatgccaattacgtgcaaaatttctattgcttttattttttagatctaattcttttcttaactttaattatgttatcgatcataatataagaatagatcagctatgtaagatggggctccaatagctagtatgatgtatgcttgcttagttgcttgacatgtacaactaagtttctattgctttagtgattaaaaataggcattaaaatcattgtccaaattatgttaatcttagtttaatatgtttataaaaaaataaacatttattagatttctcaaaatagaaatatcacaaataccaccgtaattaccgtcgcttgattcttttttttccatctcacatgcatatactagaaaagtaatatgataaaataacatgtacaatatttatatattctaaacgaataaattgtaatatccatgagttatattaaggtgaatactaatttctactcgtcaagacgtactattgggcgtgagctaaacaagagatgtctaagtctcaagtcatatgtttctgtttttctgtaccgactcgacaaattgccatccctatttgtgttattaaatcggggatcgtatacgtagaatcctcgaggggaggcctggaaggcacactcatgtctgtgtgcccagagtcgagccaagcaagccgttgaatccctaggttgtccacacagattcagccggggcagagttgaggagattgcatggttgcactccgtctctaccgatttttccctatcatatagcagtatatagacatgtcacgatgcctctcccaacagtatgcttttaacccttggtatacatccgatacattctactactattctgtacccatctgtggtcatcgtgatttgtccgccggtgagttgaagttaacgaggatctacttgaaaggggcaaagcaacggcatggcatcgagcatgaaacttactatgcgctttgtgtgctaagtcacattagacacatgctcatccacaaacgcaactaattgggattacattcttattctagcttacacaaacaaaaaagagtagtagcatatatatgatagttgaatcaaaatttgatgcaacacacaaagttccgagaaatatttttaactctaatgtagatcctaaaattaggttcagatcgtgtcaattagtttgatcttataactaacaaaatgtaaaagatcgcctatggattttatgagatagaagatgtaacaaattaaggttccaaaatttttttccaaacttccaacttttcatcacatcaaacctttcatacacacaacttttcagtcacatcattctaatttcaaccaaacttctaaacttcagtgtgtaaacatagtctcagtgtgaactaaacatagtctaaggtgtaactagatttatagattatcactggtcactctcatatcgtcagggctgccatccgcaatatgcatagtgcaaaccatccaattctgcacttctacaggaaagctagagatagccggctgcctagctagcttagtagatagtatacggtcacgatagtagtattgagctgcaatacacacacgctcgacttcccagatgacctctggctacacccatggggccccagacctagccacgcaatcaccatcccggccggcgacggcgacggcgacccgagtccactgaccaaaatgtctccccaaatctcctgcacaaaaagcgccctataaaatctctcgccggtgcaatgcattctgcctcccgtcatgtacaaacttccatggcctcgcggtcgccgaccaacaaacagatcagctcggaagatcgcgtacgtggtgctcgcggcaagaggcaccatcattcctccgacgagtggagcatggagcacgcggaggagcacgagcatggccgtggcggcggcgagcgcgacgacgcggcggagcccgaggcggagcagccggagctggagcaggaggagctgagcgactccgagtcgggcgccgagtcgatcgagatctccgacctcaagaagcggatgtggaaggaccagatgctgctgatgaagctcgagggtggtcgccccggcggcggcggcggcaggggcggcggagggttggcggcggcgggggccgggacgtcgtcggagggccagctggaggaggagacgccggaggcgcggtgccggcggaaggcgatgctccgggcgcaggacggcgtcctccggcacatgctcaagatgatggaggcctgcaacgcgcgcgggttcgtgtacggcgtgatcgacgaggccggccagcccatgtccggctcctccgacagcctccgcgggtggtggaaggacaacgtcagcttcgaccgcgcgggccccatggcgctcatcggccccgccgccgccggcgacagcccccaggcgggcggcggcggcctccaccggctgcaggacatccaggacagcacgctggggtccgtgctctcggcgctgatccagcactgcgagccgccgcagcgcagcttcccgctggagcgcgggctggcgccgccgtggtggccgaccggggaggagccgtggtggggcacccagggcgagacgcaggcgcaccagggcgcgccgccgtaccggaagccgcacgacctcaagaaggcgtggaaggtctccctcctcagcgccgtcatcaagcacatgagcccccgcttcgaccagatgcgcaagctcgtgtggcagtccaagcggctgcagcagaagatgagcgccaaggagtccgacacgtggtccaaggtcatccgccaggaggaggccctcgaccgccgcctcaagacctcgctgcacatcaccctgctcgacgccgacggcggcgaggaggacgacagcgacggcctggaggacgtggtgcgcggcgccgcggcgcaggacaagcgcaagcgcgagtacaccagaagcggtagcgggagcagcagcggcaactccggcggcgggaagttcccccgtggggggagcggcggcgccgatcatcatcagctggccgtcatgctaccggagctcgcggcggcggcggatcaggaagggcggagcccgatcaacgagctgatgaagctgtactacagctgcctgcagcaggaggagggggcggccgacggcggcgaggcgggcggcgaggggtgcgacgtggcggcggcggcgctggccgttccgccggaggtgctggccggcgtggatgaggtggcgcaggacgtcctgttcgacctcatcgggagctatccggaagtggacgacgtgttgcacttcatggacgagtgacgacgtggcgcccttgggccccaccacgtgtcgccgcgcgattgtccgggtttgggcgggagaagctatagtcaggttgatgctgcatttgctggcgctctagtgctgctactagctagtagtactggttaaactaagttaattaagcatgtgctgctgctgtgttgctaaattcgttctctatttgttggttctgtggttatggaggagagaaaggtggataacggagtttgtaagctgggtaaaagtattgtttagaggttttagacttgacagaggagagtcgcatgatagagacgacgccacgaatcgaggcgtgtggatgccgccgacggtaaaacaaaatagcataagcattatgggatttgttacgtgtgtttcgcctcccagggaaatttgttgtgaatcgtgaatgtgaaaccataatgatttgcttgtttgggtgagcttgagaatttgtgttggagaggaagcttttgaagtcaaaaaggttgccgaagatttgggagtgaccatctcgtgttgtgcctcgtggcaccaccatggcacctcgtaggctggtgagtggtgtgactctccaccgtgacgccatcagatcctggttgtccacgcgccgccgtcggatctggacacgatgcgatgcggacgcgcgcggctctccaaccacttcctcaacgcgtacgcgaggctgtttccctcccgaatccctgtccgcgcgcagggtgttcgacgaaatgccttaccggagagcctcgtggtcacggccagcccgggtgccccgtgcccggaccatcctgtcctggtgtctggtgatggtgctattcgcccggatggacgcgtacccagacgattacattcctgtgcgcgctcactgtgggcaatgtactctaaatttggcacaatcatcgatgcggaaaagatatttgtgtaaatataatcgattgtgctatatatttatcgatcttttttaaagagtttgacaaatatggcaatgtttggctaatgagaaatagaaatgatttcccacccaccaaaaagcatctttaaatcctaaccattcattctccctctttcatttaatcctaacccttcattcatttcccaatcccaatcccacccccatttcccattatccaaacacaccctataagtacatataattatattgtaattatattttatcttacatgtaacttccacataattttaaaccattagatttactttaagatttgtataagttgggaaaaaatccatagtgtgcgcatgggatctcgcgaccttcacttcatgaaaataactagttaccgtgggacctttgaaacttacatacaaattgtatttatctatacacaagttacaatataaatacattacgaatatattgtatttatatttgatagaaaatttatcgactaatggactgatagtcatgcatagaagaaaacgatgtgatcactcaaagttggaacactcacattgcttcacacttgcggagcagtgcccatattgaagctcttatggtatatcactataaaaaaaaccatttttcatagaaccacttttttttcgttggatttaatgaatacgcgcttgtaaaaatacttgagagaaattccggtcaacaacctcctacgaatatttgcaaaagtaggagtataatttttttaaaaaaatatccgttccagaggacggcaaggttgttaatatcatattaatctagatgaaataaaattgtttttttatcaaaattgtagagttcaagaagatttacaactttgtagttaacattttttttaatttaagattgtttaggattctaaatattcatcacaaatctaaaatatatttcgggggacgaagtgagcgtaactcaattgattatctcaggatatgttgatccaatccttcggacgtattaataatgatagggtttacgtgtgtgtttatagagatgcgtgtgtgcatgtgttgtgggtgtctctgcttaagaaaaaagttactctgtttcaaaatgtttgacaccgttgactttttagcacatgcttgaccgttcgtcttatttaaaataatttgtgaaatatgtaaaaagaataaataatatgaaaagaataaataattatttaaatttttaaataagatgaatggtcaaacacgtaataaaaagtcaacggtgtcaactatttttgaaacggaagggagtatattgggagagtagagtagtcgagcagagctagcggatagcccagtgcggtgcagtacagtattggacttggtcgccggcagcttccgtagcccaccacacgagacgagtccgtccagacctagtccggaactgtgcgggccgcacaaagtcgtggcaccgtcagatcccccgcagtgaggaggggcgcccggattcgcacgcaaaggcgcgcgcacacctgtccccgcctcacccccaccgcctgattccatcccttcccggcggcgcctccgccggagccccaccggccgccgccggccactgcccccgagctcgtccggacttcggacgcgggatctccccgtcgtctcccgcggtaagcctcgaccgccttggtatcccgattccctttgcctgattcacgcgaactcgcccccgatcccggggggtagctcgtctctgcggtcagtggggcctcctcatcctgcgagggcttccccagttgggtgggggtggggttgtgggggggggggggggcgcttctggtgggaattggttcatggattgcccccgtcgggtttaggtttcggtctgtctgtttggatttgggtggaatttaaggctctagagaactgactgctgactgcagggtaatgatatttggtcgaggtgtgacccgtgtgcttgctattttggatcatagacgaaatttgggtcgtatttggggtttatgcgactgtattgttgttgtcctaggcttaaaatttggcgacgattctcgaattaaattgaccgctgtgttcttcttagagacactcataatatagttggattgatcctggtagtgtttaattaaaaattcatacggcatgttaatcatagtgtcggattttttcactgcaagtatctgtttcaacttggtgtgaatatcatacaattactatttctcaaaccagatttggtgccatctgatggaattagaggcgtgaaactgtatatttcttgttgagtctgaagataaggaggatctgatgggctctgttgtaagttctgcaaacattaatgcccgatctatggaccggcatgaaaaatctggatttggttctaataagagggtcaagatctccacatatgagtgcgattcgtttcagaggataattccaactcttcccgatgaactctcgtttcaaattctagccaggttaccacggttgtattacctaaagttgaagttggtcagccaagcttggaaggcggcaatcaccagcagtgagctttcccagctgagaagagagcttggcttaactgaagagtggttgtatgtactgaccaaacttgagccaaacaaactcgattgttatgctcttgatccattgttccgcaaatggcaaaggttgccaccgatgccatcttttgtcagtgaggaggaatccactgggaggacgcagtcttcttggttccagacgtggaatgttgtgggctcaagtataaggattgctgactttataaagggatggtttcgtcgccgatatggtttggaccagatgccattttgtggttgctccgttggagttgctgatggttgcttgtatgtctttggaggattttccagagctgttgccctcaactgtgtatttagatataacccttgcctcaatgtgtggcaggaagtgagcccgatgatatcaggtcgagctttttctaaggcagcattactgcagagtaagctatatgttgtcggtggagttagcaggggtcggaatggcttgcttcctctacggtcaggtgaagtttttgatcccaaaactggtatatggagtgagttgcctgaaatgcctttcatgaaagcacaggtattaccaacagctttcttggctgatgttctgaagcctatcgccactggaatggcgtcctacaagggaaagctgtatgttcctcaaagtttgtactcatggccattcttttttgacattggaggtgaaatttatgacccggaattgaattcttgggaaacaatggcagatggtcttggtgatggatggccagcaaggcaggcaggcacaaaattaggtattgtggtgaatgaggaactttatacgttggagccttctagctccttggacagtggccagataaaaaggtatgattctgaacaagacacctggaaaactattgtaccacaggttcctgttcatgatttcaccgatgcagaggctccttttttacttgctggccttcatggaaaggtccacgttattacaaaagaggcaaacaacaatcttcaagttatgcaagctgtattgcagaataacattgagaacagtccatctgaagaaaacatcatatggaacatactggcttcaaagaactttgggtctgctgagcttgttagttgtcaagttcttgatgtttaaatgtgggataaattcagttactgatgttggcatcccgtggttcaactatctttttgactgattggatctataatttgacaaggggagagatagatatatagattacaggtatttagatttgtataagttgattcttgcccaaacactgttatataggccataagtatacatgattactgtatagttagtgttcttgtacacatggagagatttccagctgttgaaccttatccattctgctatcaactgtacaccatgaatttgttgtgatccttttgatcttctctgcatgattctgatgcctcttgtcccacatatttggtggcaaatagatgctcatgctcccatcagttgtttgatgctgaaactctggagatggtgatgaaggaaaggaacagctcattcccattatgctgactggcatcgccgtgcaaagaggagccgtatcccttgcggctctgccctgccataaacgaagccggatatgaacagtgatggattttattcctgtctgcttgagcctttttttttctgtgatgaatctatatgaggacccacatcttaagcatgtgagacaagcatcctcctgtgtggccttacaattggtttgcaactaccaaactccagtgatgtcaatgggcaatgcaatgttcagggaaaggtcaaggaagtaggcaggcatggaggcatggcgtacaggtccgggttttgtccccatgctttctttcttctccatcagcgtctctctcaaagaaagaatcatatattgacatgtgctaattatacttgttagcttgcctgcttaaaatgcaatatacttattagctactgctactgctactgcattccaattgatgtccacacgtacacggtgcactacatagtttgttgatgtggcggaacaggagatattccctcattgatcacattttatgggttgaaacagatgtctcaaactctcaatcgtcaacttttttttattggatcgcgcagtgtcaaatgtcatgcatgacgatcgttcgagatggaatgcgtgcgggagatgactttggtttataataaaaaatgaaagaagatcaatgtaatccacaactttggcatcatttgcatgtttgtcaaaccccaaaaatataactgtgaatgcttaattttctttaatcttcagctgacttcaggtgattcttcttttatttagagaagactttagttgtaatctgacaatgatataacagtacgtagtcctatatttttatggagcagaactgataagccccaactgacaacagcattattttgtctatgtttatattaacgccgctgtcatcaactcatcatggatagattaaagatccgttcattccaaatgggaactgtacatatggttatttttcctggtttgcttgataaaatttgctgtagagcttttggtcatttatatgactttattccaacagcaagggcatagccgcatatagcaattcagatagtgaaccaacttctggctgaagtgaaataccagctctgataaataataaactatattttgacgtttatgatatgatttgatcaaacttttaaaacttcgaccatttgtattttcttaatgtgtaatttaaaagcgaaaaaatgttatgcctagatttgtcttaaaaatactaccatactattataaactttttatattttctaagtttattccaatataaattaataattaaagtctaaactttaaaaagggtttgaccaagattttatcctaaacatcaaatttttatagccaaaggagtaacttagaaaaaaaaagaatgcgaggaaccgaatgacatacaggccatctgtccccataagaatggagtaaaagtgtaaaactgatggtgatttgagcagacacaaaaattgatggagaacagatgagtcctcttttacttaattacttttcttttactcccatttcaagtaaagaaagcaacaaatgaaccaacatttacatggagtgagttacacacacctcttcaaaagaagagaaacaagtaaagaacacactacacaatcttcatcatcctatcgaacagccagctggagattactactagtaataatataattaaacccaggaacaagctcaactagtagcaaaagagcggaatcaacaggaggaggggaggaagaaggccagctcttgatcgatcaagcgctactggtttccatggccggcgccggcgccgtctccgccgctctggggtgcaccttcttcttcatgaacccaaacatcccgccgcccgcagccgccttcttctgccccgcagagccatcggcggcggcggcgacgtccttcttcccggccaccgccgccgccgcagccgcctccgcggcctccatgcgcctgagcttctccttgtaggcgttcttgagcacgtacgcctccacgaagtctcctcccatcatggacgccattctccaaaaacttggatcagatcacaccttgcttgctttgcttcgtctcgtcgtcgagatatatacctcgtctcttggtttgctttagctggtaattaagctagtttgagaggattggccccctatttataaggctcgtcttagacttggcacgcaagcagaggcgaagcgaagtgaaggtgacgtcctggaagatgacaagggaaggagatggggctcaagctcggctcgagcgctctactactctacttggctctcacggaagcttggccatgtcaccgcgccacgggtgacgtacgtgactctgctgcgtttgcgtttgcgcccggtggctgtctttgacggcgatggctatggccgtgaaaacggtcacggaaattttcgatagatagaacatcgcttttgcgaaagtagcatgggctgtaaattttttttaaaaaaaaacttttatgccgtactgtaattatcattcaagagttaaactgtaactttctaattaatcgtttataagtagaacgaccttttcaccactgcggggggtttgactcggtaggagaggcggtgcacacgttgatctgtggctatgagctgtgcacgtggcggctgggcgtccttccgatggcttttcagatttgcaggtggttctggtgggtttggagtagggtgcgtggaagagcggtggaaatgctgaggaagatgtggagtaggttgataaagcgtgtgatcaaacgaagtaaacgtgcgtgtgtgtgatggatcgacgagtggcttccgatgcagagctcatacaagctgctgcatcatgaaccgcatcaatcgatcggtcatagcacggttagtagatgtgtgcatcagcgcgttcgtgcagttgaaaagtgagaaggaaaaacaacgagtttcgttgttgctgatgatgatcgctaccattcggcaacagccaacagatgtactactagtagagcaggatagatccagcagtccaaatttcacaatttggcgctttttgaaaacttatttcaaatttggttccagccgaaaactatcaccagatctggaccccgggctcagcaccaggtgcgatggcgctgagataaaacgcctcagcgccaaccacgtcggcgctgaggtcctaacggccgtttctttcggtgtaccggcgtctgctgacatgggcaaccttagcgccagatgcattggcgctgaggtgggccattccagcgccagtttgattggcgcaccccccctgagagatggtaagtggcgcgggtgggagggggggctgcatctccgtgccaaacaccttggcgctgaggtcggccatgctcagattgcctcccgatgggatgctgagtccccggggggctgcatctcagcgccaaacagcttggcgctgatgttgtgcatctcagcgccaatggttctggcgctgacctgtacaatctcagcgccactctatttggcgctgatgtctggcaatggctagcaaagcacagccagctacacataaattcacagcatatagagttcatcacagcatatagcacacagtatttagcacatcacagaacatccatcaaccatcacagtatttagagtttatcacatccatcaaccatcatctagagttcgatataagtctaacgctacctagagtgttaagtacaccatagtactacatataacggttctatgcgcatctaatcattgcattgccaacaactactataaccacaacgtagagaacaaactaattagagaaaatcaaccccaaatcgtgtttctagggttcatcactcaatgagcaaatccaagtaaaaaatggacaaataacgagaggattcggaggagaataccttggcactatgtcccccaacgatttcccctccaaaatacgaagattttgtggatatttactcgatttttggaggggaggagagagaggggagggcgccgccccttctcagccgagaggagcgaggaggaagaaggagtggcctggggccggctcggccccgagggataaggcgcgacctcagcgccagtcccgttggcgctaaggtcgcgaaggtcagcgccgatgcggttggcgctgacatttaccacgtgggccgtctcgctccgccgtttggagacagccgtcaggacctcagcgccgatgcggttggcgctgagttcggagtccagatctggtgatagttttcagcagggaccaaatttgaaataagttttcaaaaagggccaaattgtgaaatttttgggatccagcagctattgaactagttttggttggccacttggctactttgtacccccatatatccaggttcaacttttcgtgaatttgggctgaagacatgtaaagttgcttagagctctgtcattttcttgggtttttcgttgttatcctggactgcataaatcccagagagagagagagagatacagtccaagagaagttcttctctgatatagaagcaacgtccatgaagaacttctgaacttaaagaatgaatacattaacatggaatattaattttgattaaaataaaataagccatttatatttggggctgtcgctgttaacttcactctcttttttgtaattctgaaagagagaaaaaaaagtgatgctgtttgtgtacctatcggcatcatcacggattacaccgtatactgaattctcattccagattcagttgggctttcttttcatttcaacgcccagaaagcaaatcaaactctttagtagagtaatttaagtaaaacctctaatgtgaaacggtacagtacagattcccgcaattcaatatgggctctggacgcacccgtttgtgcttccgcatatgtacttcgagtgattctgtgataggattttgattatctgcatttccagatcctcatccttgttcatctttcggatagtactcctttctttgtctgttacaataatgacttcctctttgtacgttgcaagcaaattggccacaacgatgttcatcttgtacttgttcagagccatatctgctttctgaataaggatgtccgaatccgtctccaactgccgccattattttacaagtagttaaacaaaagtgacaagagtgtgcacaaaggcagcattattgagtgttgaatgctttcattcttccgtggtcctggaaattagcttaccttaaatgatatacagaacgccaagggggcccattggtttcgcaacactgaaagcattttcggaacttgactgagcctcatatccagagggcctccacctgactgaatcttatgtttggcctgcagaacagtaaaaagaagttcccgtttgtcatgtagggcatttccatcaaagcatcagtattgtgatcagtggtttctttacccaatgtttcacatttaatacaaagagtacacatgaatttctcaatcataacatgcttctcttaaaatcataccatgctatcccaagggacatagaaatcagacacagccgcagcaagatagaacattccgagtggcccagccgaacttatagatgtagcaaccatcttcaatagctgtaatcaaatacagtgtcatgcttttcaaatttgttttgacttacatgtaattctggttaaaacgtcaaatttaaaaagacctgaaggtattcaaatattgtagtgaatgggagtttcaacagatagccgccttcaattgcctgcaagaaagtcacttgtcagctaaattttgcacaagcagcatgtcactgctgttgagaagctcattccataccttgcaataatctccaattgctttcttgaccactggcgcgtggcactccgccactgtataaacatacacaagttaaaatttcacgaaagaagcatttcctttcctacgtgcactaggattgtgggttaccaaccttgaaccttcgattctgcatcgacatcaaagaatttgaggaatgaatcatcggggaggaacctacaataaggctggcagcttcctctgcacacatgtagaagcagtaaaatgtaaaatacaggttatttcacagtgagggcatagccccaatctgtttattgagaattaacaatcttttcaccctatgtagaacagaacaattgacaaaactgaaagggggataaaaacaggttcagtttatttgtgggaaattttcctaatcgattaccgtcgatggaggaagataactgcatagccagccttcaaaaaatacctgcgtcatcacaagagcaccttagtcctatgtcaggtcagaaacaactattcactgttctaaaaagatcattaaacaatgtcgaaacatgctgcatgcctgcatgaatggccctagcgtacgtacattttgatggaaccagttgagtagtgagtacttatacaaattaatgcatgtagcacttgtgatctaagggaaaaacttttgtacggctggaatgtacaggatggaaatgttctctgcctctctggtcctcgcgacgatccgcagcagaaaatagaagcatatacaggtgatagaacagtagtataagggcgtttcgattgattactcggtggaggcggcgccgcggtggccggagctgaagttgtcgatgtaccgcacgcagcgctgctccagcggcaccgtcgtcccgcccgacgtcacgcacacgatccgcctgccgccgccgcccgcgcccgctgcacgcacagtcgcacacacgcgggccggtagtcatttcgccgagcacctaacgtgcgtggtcaggataagaggtggcgcggggaggcggggagccccgtacctgcggaggagttgcgggcgatgaattcccccagcctcgcggccacggcgtcggcgtcccgcagcggcggcgccgccgcgaagaaggactccgggttctcctcggcggcgaccatcgccgatcgatcgatcgatggatggatggatgcgagtgattgagcagaacgaaggggcgggaagcatttaaagggggtggatgacgcggctggcctcgacgcctccagcctcaaccgccaagaacctggagcctctccgatcggtcactgccgccattacggcgcacgtcctcgtcgccattaatcgcggttggcgcttgtcactcaccaccgccgtccctcctcctcttctagtcttcttcctcatcgatcgagctcaactactccaatgcctcctccattaactcccccacaatttctcgttaacagaagaaaaggtcagaaagggggtcgatggttagtcgatcgccatcgcgtgcgtgcatgcatgcatagcttccgctactggcctgccctaccgggaagaacttttaggggtagggtcaaaggggccatttaatcgacgcatcctttttttgtacgttgcgtttggatttgccagattgctatgctagtattgccactctaatagccccgtcatttcgcttatggatatacttatttcgtactccctcagccatgagttcatgtatccaaccttaatcatttgtcttatttattttttaaaaaaaaaactgaaaaacttaagtcacgcttaaagtaccattcatgttttataatctaataacaataaaaatattaatcataaaaaaaatttaaataaaacggacgatcaaagttgtacacggaaactcatggctgcgtttatttctagacgaagggagtacttcctctgtttttttaacagatgatgtcgttgacttttttttaaaatcatgtcgttgacttttaatatacgtttcactattcatcttatttaaaaattttatacaaatacataagatataaatcgtgcttaaaatatttctagtgataaaacaactcacaacaaaattaatgataattgtataaatttttttaataagacgaatgacaaaacgtataccgaaaagtcaatgacatcaaatattaaaaactggaaaaagtatcacttattataaaataaaaacaatttgtaagtaaaactttaatatacatgtctttaacgactaaaaataaatgatttgaaataaaatactacaaaacaaaatttaaaattaagtttaaaaattaaaatttgaacttataaatttaagtataagcttaaatagtggggctgcaaatgtgcatgatatccgtcatcatgcgcctgcgtttctagttgggttgctcgcatggggtaatgccgtttggtgcatgctcacttgaatctggcacgtcaggtgaggagaggaagagtagcccagaatcgccgtgtgggtccgatcaggcggcgcacacgcgtcgtgcaggcgcttacgcggccaagcttgtcatgattgagatactaggtagtgctcccttcttaaaaaaaaaaaaccctaattctgtgtttgaatctggacactgggtttatctagatttaaactcaggattgattttttgctcaaagtaatatcgtatcgtaagatcgtatcatagtatcgggataccatgagattttttttaagtttaattaatatttatattaattatatatagccattatatatataaaaaatatagtaatgatatatgtcatgcaaatagagacatttatcaagagaaaccatattggttttaatatatttaattgattttcatataaatttgagcatatttagttacattattttcaaaccatgttattttaaataatattttgtagtatagtaggaatagtagagtcgggataccacctaatatttcgtaggatcgtgtagtaatgaatagtaggatcgagatactatgaaaattaggatactaggtggatcggtatcgtttcagtttgttaggatcgtagtatcgtaagattaggatacgggatacgaatcgggattgcctccggctgccttgcctgcctgccgctgcggcacgtcggtgtttatttaccaccggtgctgcgcggcgcctgctagttactgcctgcgtctaataattaaaaaaaataaatcaaattctacctaaatctatataagcatatgatttgatctataattaagattttatttatttttgaatatatagggggtagttaccccttccacttagcattacgaattaactaaggttagggatggaatttttttttgtctccgttgaaactctcacaaaatcgcacctggatttttttttcgcacctgattagttgggatgatcgcagaggacgcatgaaagcaaattaaagtttaacatgatcagttatgtgtacgtatacctgttgagattctagaatgtcgtgtggtgccggcgtgctgcgctgccgctgcggttgatgccctcagatggcgttcagtgtactgtagagtacgcgccaattaatcagttgggtgattgccaggcaggggaagtatatggtgcaatcacctaattcggtgtaataatacaactctcatcctacaccgttggatcgagaaatggacgttcgagattcgtccacgtcaccatgagttaaaatttaactcgcggattcactcatgaatttaaatttactggaagttaaattttaactcatggtgacatgtacgaatctcggacgtccatttctcgatccaacggtgtaggataaaagttatattattacaccggattagatgattgcaccgaatacttccccaggcaggcatacgttggcctacctacgtgtgcagtgcagctgtgcaggcgacctttccaaacctccgggaggcgggagactcggctggatgctggaaggctggacgtacggactttatggatgccctggattgcgggctggatcagcttgggtagaagggacgaaatggatcatgattcctgatcgatcaaacatcgttttcatacaaaggataccgttttcaaccgttatatttttgttatatataaatattttttatcgtattaatattgacaccgagtagtttaaatgataaatatgaccaattataggtcgatctagtgttattttcgaagagatgctatccattccgaccgttttcacacggtaagactgtagacttatccgagtatagaaacatggtttcccttatgcttggctgggccaattctatgtgtctccttcctcggaataagttcactcgccatccctcaattttacaccgagtttggttgacatcccttatccttaatatcagaaacatttacctcaaaaattttcaaaaccgtacaacttcagtcctagagcagtatgagccactggtttcgctgacgtggaaccctagtcagcaaaaataaaaataaaatacatacaagcccacatgtaactgtaagtgagatgaaattttgagtatgtggggttgacatatcagcgcccacttcttcctcttctctcaatttttatcctcaaccacgcgaaggcgacggatcaatggcgcctgtggaggtggcagcctagaatccacgagggggcgtgccggtggagaggatgcggcggcggcgtagacgggtaacggaggcaacataggcggtacaccgacctaggcaatgggcgcgcgatgatctgcggcatgacgtacagcagaggcaccgggtgccaggcgaacgatgccgggtgcgcctcctcgcacgagcgccgccagcgagcaggccgatcgtgcgctcgtgacgtagacgggatgggatatgacacagggagtatcccccgctttgcctcctcgcatgcacgccgctggtgagaaggcaccgtcgtgctcgaggcgtggacgggaagagacatcagagcgatgatgaggaagctgccgccattgacgtgacgtggagccgccgccgtcaggctcctcccatccgctgcttcgcatcctcgcacgcgccccacctccttcctacttctctctcccccatctacattagtcctcttgcctggttcgtcgcaggcgacgcacggccgtcggagcttggctcccacttcgccgtggtagcctgccaagctcccccttcgccggcgtccccctttgtagagacccgccgccgcagctggtggcaccggcggcggagatggcgtgccgcagcggccccgccgaggttgccaaggcggctgtaagtctgacccggatgaaccggtcggccgaatttgagaccgcctccaccgccgatgacgccaagcccaccttcgcctgcgtcctccttccacttccgcctcccgtcctgccgaggctgccgatgtggctatatgtctgaccgggcatcaggggcctcccgtgacgaaccggccggcgggatttgaggctgcctacgccgcctccgttgcccgcctttgcgcgccgccaagccctccttcatcggtgtcctcttcccacttccgccccgaccctgtgcagggaccccggccgccataatctccatgaatgcgcctctactcaactcctgcgaagtggcgacgatggctgtggtgcgaagggcgaagcggcgacggtggcaatgcggggcgaagggggtgttccgacagtggtggtgcgtggccaccatggtggaggcgaggtggggtcacgttagggggaaccgtgactgactagtgggcctagacatctgccacctcagcaaaacatgaaaaagtaggatctatactgcccttttttttttgccgggatctatactgccttgggacctaagttgcacagttgtaaatacttaggccctgtttggtagggctccaaatttgaactcccagctctaaactcctactccagttggagctagctcctattggagttgcagacccatcaaaagtgtttggcaatcttttagcttcagatctgaaaaaaaagaaaaaaaggaatccccgctgccggccgtgcgccgcccctacacgcgccgtctgccaccggccgtgccgcctaccgcgcgccgcccctctgtgcacgccacccgccaccggccgcgcgctgccacccagcccgcacgctgccgttgccgccggatctcgccggatgggaggagatagaataggaggaggaggagtttaggggtaatttagtggtatttttgtataaatatatcaacatttttaagggtagtgggtcttttgggggtgaagtggagctgtggagcagaaaaaccaaactccacccccagtacaaaattgtggaactgctctaccaactctgttcaaaaaataaagaatttgtaccgtttagtatagctccagctctatataaattggagttgggagctggagctgggccaaacggagccttaaggggtaaagatttgtggatgtcaaacaatctcggcttaaaagtggaggcacggcgagtgaacgtccgccgtgtttgccccctcgcgtatcctttcctctttcttgctgccgtatcgaaacaacgtacgctcttccttaacataacaacaaaatgacaagctacttaacaacagcgaaaaagaaaaacagggccaggagaaataataggcactggaacgaaaagaaaaatggacctatttttttctcacaacactggtttatcactattgtaatagtattctcttcattttaaagttgatgatggcagttatggctgtcatctaagctatttgaaagactagaaataaagcttttgataatatccttcctaaagaatctattgaggtgattttcatgatctataacctgatcgaatcttgggctattttgcaaaattggaggcaaaccggagaaagttggagctgggggcagggtggtaaagcaagtggcaagccatgttttcagctcaagatatggttggcgaccttgtgctagaagattggaatgaagctgctggttgtgtgcttttgcctgaaaaatctgttgcctcttgggctgctctcccagtctcactactctcgttttctctgcgttctagtttctgttaggacagtgataaaattttactcagtcttctctccagctcttcctgctggcttttgtgagagtaggatgctcagctttgttgggcacatctctgttagctccatttttttcttcctttttctatttgtttataatgacttcgtaattccgttccattaatgaaaagggggcctcgagctctagttaaaataaagattaacaacatcttatattaagaatttaaaaagaaggtaatataattttgtccgcgttatcaaaacgaaatgctgattatcttagacaggagcgaaaagaaaaatcaaatcgcaagcgactttagaaaaaaaaatggtagaggaaaaaaaaaaaggaatccggataatggatcggggatttgaacccgacgtgaatcgaacacgcaaccttctgatctggagtcagacgcgctaccattgcgccacggatccggtcgtgctcactggtaacgaatcaacattttttagtactacctccgtcccaaaaatgtagctatttctaacacagtactttgtctcaaaatgaagctatttttctacctaccttctcctctcaaccaatcacaaatattctttttcacctactttctcttttcaaccaatcacacacctttttcaatcattcttatctactttcttaatacccgtgtcaatttaaaaaatgcttatattttaggacggaggaagtatatgcgaaagtgcaaaccgagcactccaacttatagactcgtccggtactacccaaatagtgccaatacaacacagcccccacttggcacttgggcagcacacgagtaaatactaaacacgccgtcccaatccatcgccaacacgaatcccaaccaaaagctcacaaaaaagcgacgaaaacgaaacactaaacaaataatccgaataaatcaaacaaaaacaaaacaaaaaaaacttgaggctctcagaagctttccccgccacgtgggccccacccacctcttaagcacccaatgcctaccagccacgtcggatcgcctcatcctccgtgcccctcccacgtgtctcctctcccaccacctctctccccctcgctttggcctcttcccgcttcctcgcctcgtcggcttcgcctctcctctccaccactccctccctcctccgcttcctcctctcgcagtctcgcttctcgccgccgccgccgcgcacacgcggcgcgcccaaaccctagtccctccctcgccgccgccctcgcgatgtcggccgcggccggggcggccaccctcgtcgcctcctccgcctcgctctccgtgcccgaccacctccgcctccgccgcttccgcctccacctccacccgcgcccgccgccgccgcatccccagctccggtcccgctccctccggcagcgccgccgcttcgtgctcgccgtgctgcaggaggaccggtccccctccgcgccggatgaggaggcgaggaggtacgggctcaacgggagcgccccgagcagcggggtcgggtacgacgatgccgccgtggaggcctacctcgggaccaacggcaacgggagggggaacggtgcggcggcggtggtgaagcccgccgcggagtcacggagcagcgccgccttggtgtccgcggggcctgggccgggggatgatgagaggaggaggaaggagcgggtggaggagatcggcagggaggacgcctggttcaagcagagcggcggggattccaagcccgaggtgaactattcttattgttttcttgccttttagctttgcagctacatgtgttggccagctccagttccaagctagtgttcgatcagagggctgtgccgtgtttgagatatgcaaatgtttagctgctcctgatcgaataagaggagggagtatgatcacgcattcgtgccatttttagcacaaggcaaatgtgaagtacctactaaaattagctggagttggatgttgccttgactaaagcaagagttcagattgactttagtcgtttgtttgtggttttgttcaagtttggatgtagttaaatgtagctgtagcctgtagggacgagcaaggcaggcaatgccttatatttcttcaggaaacaaaaaacattgagcagcgtggcagagttgatgtttagtaggagaaaaggtaaagggtgtttgcgacttggtagtgtattgtgccatattgaaaagattttggaacttgtttgcttttggcttttgagactttcgttgcagtttttcccccagttatcccccattgtttgtgttagtattggtactttttcatcttctgacagaaatacaactgttcatttcaatcagatgaagcaaataacagttactttggtgggagtggattttggtccctcgaggagatgtcctctcgttgtttgcatgtcactcaaatagttatggaaaaaattgagaagatgtattaacatatgatatatcactctacaaacatacaagtttaaattcatcttctatatctcgcaacgaaaaaaacaaatttgactgcgaatgtaggttaacttgctgtagtttaatttattttttcgttgcgagatgtagaagttgaatttgaactttcatgtttgtggagtgatatatcacatgttaatatatcttctcaaattttttcataaccatttgagtggcataaacaacgagaggacatcccctcgagggatcaaaatagtttccctactttggtcgcctttttttagcaaataaaagttactctgcgtcattattattgcttttccttttggcgttgaacatctaaatcgtgcaggtgtctgtcgctcctggaggtcgctggaatcggtttaaaacctattcgacgattcaaaggacgttggaaatatggggctttgtttttaaatttatattcagatcttggctcaataatcagaagttcacttatcgaggtcagtgacttgtcaaaacaacaaaaatgaactcctatagtatggttatatataaccaaactgaggttcctgatttctatgttagtataatatgtgctcggggaagaaattaaagagatgaaggtttataatgtttttgttcctcatgaaaaagaaaagagagaatgtatttatgtacttgtggaaaagaacaggcgactcaatgttttcatggtgcagtgtaatcgcatttactttagttactatgatcatagcataagacattttgagaaaattcacagacataatgtagtttagtaaaattcatcaacccataaatcagtgtatgttgcatattagtcaatgcaccgaacatgtatttttcacccaatgatgttcagtgaagtcctgaattcttctatatgtgcagtgtaaaattgtgtgcacggtacattactctgatctcatggaattattacctacatgtttatgacaatattgtgtatcttcattaacatttagaataatttcttcaggagggatgacggaggagaaaagggtaatgaggaggaaagttcttgccaagtggcttaaggagagtattttgagactaggtcccacatttatcaaaattgggcagcagttctccaccagagtggacattcttccacaggaatatgtcgaccagttatctgaattacaggtctgtatgttgaaccttgtagatgtgcttagacaatttcttgatagagacctgcctctcaacagatctatgtttatactctttttctggtggaatactggaaccgttttctcttctgcaggaccaagttcctccatttccttcagagacagcggtgtcaattattgaggaagagctaggggcatctgtgaataagatttttgatcgatttgactttgaaccaatagctgctgctagcctcggtaataagctaacatgatataatgagtatttaactaaaactagaacatttttcgtaagcgacttgatactacaatatatccatttttggcaggccaggttcatcgggcatgcttgaatggcaaagaagttgtcatcaaagtgcaaaggcctggtctgaaggagctatttgatattgatctgaaaaacttaagggtatgtaatttaaatgcgtgcatatttctccaactttgtaacactctattgctgttaattacatgcaaaactggggatactattattcttaattaaaatatgattatttcaataccatttgttgatgagtcaactgttctgttctaggtaatagcagaataccttcagaaagtggaccctaagtcagatggtgccaagagagactgggttgctatctatgatgagtgcgcatctgttttgtatcaggtactaatcatatgtactaggatttttttattaatctataggttgtttatatcctagacctttaacctcctagatagttaatctcctatgacctttggtcttgtgtaactcactagctttgattgtaactcaactatttatatgagagatcacctccccgcttggactgaggcatctattccactttctctacaatatgattctctttttagcaaattatgaattattcaaaaaccaaaaaaaaagtgtattgctaatccgctgccattggcaatatattagtgtgaggctcaggcatgaacttagaatatggatttcttgaatttggcattattttgtacggcaatgcattttatcatgctctctcttactctgagttattcacatcgtcatatatgtcagattatgttagataaattcttgtaagtcagccatttgacctttggtatttctgctggtaaagaagtcatatgttctaatcagcccatggaattgtggttttcaggaaatagactatacaaaggaagcatttaatgctgaaaaattttctgaaaacttcaaaaatatggattatgtgaaggttccagagattttgtgggagtatactacacctcaggttcctactatccagagacttgtaaaatagaatatcgagtagcatagaatagaatataacactatatatttctgtcctctatgcaggtcttaacaatggaatacgtcccaggaatcaagataaataggataaagcagctagataagttaggagttgatcggaaaaggtatgtgtgctgtatgctggtgagccatagcttcagtttgctttaccaattgacattggttgcttattatccctccttgaacccctctcaggttaggtcggtatgctgttgagtcgtacctggagcagatcttatctcatggatttttccatgcagatccggtcagttgtactgtatatttttcaaaagcaatgctgtagttgtttgtcctgttatggttatttcttacttttacattattctattcttgcactagactgtgcaaatgaatcatgaagatgattctgcactgagagaagctatatcatcttttgacgtagggagaaactactctctccggtcgtaaatatttggcgtttaagacaagatctggtcaaactcaaattttcgagtagcaatattttattcgatgtttagttttaaaaaatagaaatggtaatacatagacttaccttgaagagtactatataatatgattaagttgttggattttataaactcatgctaatacgaaattgatggtcggaattttaaaagtttgaccaaatagtcctaaacgtcaaatatttatgaatagagttagttcggtgtatatcattgtagttctgagatctatccctgctactgggccttttgcaaggtggtatatgcttaatttgttaaaagttgtgtaaccctgtaagtctgtaacctcagctgtacatgcttcagctacatgcgcatgaactataggcttagagatttgttccggtccaataaaaagtacctcgaggtaccggtacctcacagtactaaatcgtttacaatcgttggatctaacaattcccatcctgcccagctagatccaactatcggaaacaattcggtaccgtgaggtaccggtatctcgaggtactttttgttggaccggagcaaatctcataggcttaatgagcaatatgctattgcctccggcattacaaatttcatggcacataatcattcttttgtccttttcctcctttttaatttctcaattcaatgcagctgtgatgctccttttaagaagctacctttttaaaaataaacaacttttaaaaaatctaatatagatttctttacagcatccaggaaatattgctgttgatgatgtcaacggtgggaggcttatcttctacgactttggaatgatgggaaggttacatctgatatctttgtttgtttccataaacttccattcagttaaaagttgtgcaatagtatgtttttccttgagtagttacagggttgcagaacgtttaatctgaccttcactcttcttactttcagcattagtccaaatatccgggaagggttgctcgaagcattctatggagtttatgaaaaagatcctgataaagtatgtttgtctgggcatgaccttcaaaagtataacttaaataccttaagttctgcaaaacatccaataataaattcctgcaggtgcttcaatcaatgattcaaatgggtgtccttgttcctactggagatatgacggctgtcagaagaacagctcaatttttccttgataggtaataattttgttctgagaggatattcttcgtaattacctatatacctcgagtttcttgagtgaggtgaactactgtaacacttggcttcactttgttgtgtgtatagcttcgaagagcgtttagcagcacaaaggaaagaaagagagatggcgactgaggaacttggatttaagaagcaattaactaaggaggagaagtttgaaaagaagaagcaaaggcttgctgctatcggtaatgagtcaatagattctgcagcctattagagaacatgataaaagtaaatgtgtcaaggtgtatgtatttcgaccggttgctttctgtttacttgaaacaaaattttgcaggagaggatcttttgtcaattgctgctgatcaaccatttcgatttcctgccacctttacttttgtggtcagagcattctcaggtatgatatgcaataatttgtgtacaagaaacgtggttgtgacataatgccatggttcctcattctccattctgtgtgcagtactagatggtatcgggaagggccttgatcctagatttgatatcacagagattgctaaaccgtgagtatttttctccttcaagaattttgttttcttatttaagtttcaagttgcaatttgggttctgacttgatacatccaatgaattgctagatatgctatggagttgcttagatttaatgaagctggagttgaagttattgtaaaggcaagttttcatctttggtccatagatttaataccttatttgatggcacatcttctaatatgactatgcatgttcagacttgagagttttaagcgctcttggttttattttacctcaggatgcgaggaagagatgggaaaggcagtcccgtgcattctacaatttatttcgccagcccgacagagttgaaaagcttgcgcaaatcattgagcgtttggtaaaaaacaccttttctccattattttctgcagtttgctggttttgtttgtagaactgtcgtagataattgcctctttctttttctttttttctcttttttttttggcttttgcaggagcaaggtgatctcaagcttcgtgtcagaacattggagtcagaaagagcattccaaagagttgcagctgtacagaaaacaattggatatgtgagttcagaattgttgatgaatggtttactttttgtatttcactatgctagtacaggaaaaaaatgcaaggtttttcttggaccgagttagttggaactggtgcagataataaattttgtgccgaaacatctttagagattaacctagggtgcttctgtttaaaggggaaaaatgtttggttgggtagaacagcctttaaattatgagaaaatccaagaaataccatttacaagtactcacttccaataaatgagtgtcaatccttgttacgtttttcgtataaaaaaactcaaaaaagttgtcatgagctctgccttatctattaagaggatcctagtttcttgaataaaactgtcttaagtgttttgagtaatgcacatcaccgtcttatggtttgttttgaaatggtgaaatctgcttgcgcatcacgcagggagttgccgcaggtagtttggtaaacctcgccaccgttctctacctcaattcaatccgggtaagttaccaagtttccaaacaagccatgttcatctttttcatcagattactcttgcacagctgtttcactgcaccttcaatcatccactgcagttgccagcgaccatagcatactctctctgcgcgttcttcggcctacaagtccttgtcggccttttgaaggtcaagaagttggatcaacaggagagactgataaccggcactgcttgagtccgggcataaactggtgagagctgacccgtgatttttttggtgtcatccacagcggctatatatcttccccgttttttgtttctttctgtccaaattttagatcccctacacgttgtagcatagccatcggtgtacgataactgtatatgtagatgcggtgaatagatgaaaatgtacatagtgtacaatagacattcactgaggtgttaaggtgcttttgtggttgcaattcaatcttaaatctctcagatgaaatgagatgaatggactagaggaagtaatagatgcaatgcaatacgggtttgtttggtttgctaccatgtcaaaatgttagtgatgtcaaaacctaaacaagtttttgtagtgctaacatcttgtctgattgtgtatgttatcggtatattccgatagcaaatcaaacattatcaaaagtactattcaaagtgtcagtaataagggcacaatttgatcgacttcaaacaaaattgacccgtacatgtcctctattgaatttcacacatcaaatttgtggcccaagcccaaatgaggcacgttcgttccggcccaaagtcatttgtttctgctctcataatcagatgctgcaacctgaactaaaaatgctagcttagctagctagctttaatcgcatttcctgagttaatgatgtgatgtcctgaaaaaaaaggggaggagtctcggttgcaagaatagttaattagaggagctggattctagtcgacggggaggaatcttcagctctatactaaactagatttgacccggtgttcactattattggctacttccaatattaatcaattcataccgatacatgcacctgtgatcttggacatattttttattgcagcaaactacggcaggtgacgtagtaggtttgtttcctgcccatgcaccgtgtttcatggttacttgtaccatgctcttctgtgtgctgcacatctagagcaagttttgtgtagctgttgatcttatcgttttaacggcaagtcaacatgtatcttcaactattggagcccagagatcacaaccaacaaaacaaaagaagccaatctagattattacacaaccagatcaacatttttgggtaatgacctgtctttgtactgtacgaggcaaatgaacttttttgggtaagacaaattctatagtggcttcaattctactagtggtaaaatcaatagactttttttctcatctatcatatctatatctatatttctgcatcaacaaccatagtagaatcatttttctattaatagtaaaactcagaaaatattggtaaagaacgtttctagtaataattcgggtcataaaatattatgagtaaaaaccaccaaaatttctggtaaatatttatgtgctatgcaagatcattaactctttaaaaaatatatcaaggtcatgaacctgctatatacttaggtgaaaccctcagtttccccacgtattgctccaggagtttcatgtgataacaataagtaaaaataatatgtaagatagctagatagcataagttgatgtggtctacaataatttaaatagtatatatattgatgattcaaatgtaaaagtaaagtgatgtggctttatgagagaagaaaatgagtgagataatttagtccatagattaattatgtaagggttaaaaataattaagatgatatgacttaatgagagaagagaagaagggagataatttgaacaatagattaatcatataagggttacaaataattgatgtgatatggtttaatgatttaagagagaaataacattccctaagtgaggataaattatataggtatataggatatcataaaaaatgatggggagggatattgaaatattatgtaaattatatgggatgatgatttataacatacttgtattctaaagctgtaaaatttaataaattatagaattatagataatatagcgtgcttgcatgatgttttaagatgtcataattgttagtagataattatgtggcatctttgcatgttgagctttaaaatttagtgggttataactttataatgtgaattatgtgggatgatgatttaacatacttgtattttaaagctttaaaatttgataaattagagaattatatataatatagcatgtttgcatgatctttaagatatagcaattgttagtgaatgatgatatgatatttttgcatgttaaggtttagtattcagtggattgtaactttacattaagataggatatggtgatatagagtttcaccggtgtgaaaaaaaatacaatgcctgtattgttttctttaattaggacgagattgattacttcacctacctttgtttatttttttttgtttccgacgagaagttcaacctatgccaaacagaaactaatctctcgttttcaagataataataaaacaattagttgaacaatgcacacgctacgcaccaaaaattatacagagctttcgaaccaactctccgcagaaaaacaaccgggcgaaactactctttccgaaacttgaagagttattttgcccacagaatcgtaaataacaatttgctcaccctaagtaatggccagatgagaaatttgtcaccgtcagctcgcaaagtttcgcctaaataagttaagaaaggacacacaaaaatcctaaattaatctccatgattggatgtcgctatagcaccctgctgttgcacgatttaatcgactaggaaaatataacgtgttgtctcataagcactgtgataagccactctctcccaaaataaaaattgggctaatcaaaccagaccaaatccaagcaaaagctctcatacgcagcgcaccgtttctacccttttgcttatcaccaaaaggcaaaaaatctggcgctcgccgcgcctttccgccgtccccggcgatgtacacacaaaataaaccttactggtttaatcaaacttacgtaatgagagattaattatacactaatcgttcatccgaaaggagagattacatactaattaattaatcgccaacttaattaaatagcttcattacgtgcagtctagctggagctttaatcgtctcccgttttcctcgagcaatgcatgcatgacctgttaattacgtggacggcaacttgtttagttgtacaaattacaatggcgattaattagtcacaatatgtactagtactaccaaccctacgtcactccactcgccgatgaattgtttatctctcgccaccgaaaccgccgattccgatggtttcccgctgggtaacatgccccatgtatgattaggatttaggcagctaattaatctaggtgtgcgtgtaatcgcacatctcgctgcaccccacccccccccccccaaatgcaaacatcttgggccgtagctactgttgttatatactactccctccaacttttgatagttatatttccaaatctgaaaaatttatttttgataggcatattttaatccaacaacctatcatcttaatgattttcacggatttaatgcatgactctctatgcttccacacatgattggctatatgggtattaataaatataaatattaatgaatcgtttgtttacgaggaatgactactagcatgtttaatagaatgataagtagaattacttatccttggtctgtgtgtcaagataaaatatgactatcaaaagtagatggaggaagtagtacattatattgtagtagctccatgctaattgccatgcttacaagttaagttgtaatgtgtcatctaatcaatcttaggtcctgtttagaagcttttgacaactgcaacttttttctaaagagttttcagccctccttaacagtttagatttttatgaagatcctaagaattgaagttataaagtttagaaaataaattaaagccggaagctgaaaatctattttttttcctgatgcttaccagtggctacccaccccagaatctcaagccttccgaacaagagcttaagtactcttctgacatgtgggccacagggatatacggaatctgttacacctaacatgtcactatgccggtgatgctaattaactttggcagctagctaacttgtatgagcttgtgcttgatgtacgtggagcattttggatgcttaattattagagatgcagttgcaggcgttgatagttgagcaaggagcttatatattcagagaaacctttgtgccgggccaatggctgttgcttgcgtcacagactcgcaagtagggtggtttattcttaattgctcccggggtttttttaaaaggcatatgtggagaagcaaacttgtccttttgaatctggatggaagaatccttcctagctcccaatggtgcagtccaaaagatcatgatgacactgcatccgttccttaatcggagtagcactaactaattaattacagtaactaattaatttattacatattgtcgtcgccttaacaacccatttagcatcatgtctctagcttctattgacgcttcgaggaaaaatggtaccccctgattgagtgtctggcactgagcttttgtactgtagaaaatatggaggaaattgcacaattctattatggtttgatctatagttatgtacatcaacaagtacttgtctagatgtaagtatccagaaataaagtctttttttgacggagttagtatgttttcctgaactcaaatttctttgtttgtcaagaacttaatttaaaatttggcattttcagttattggcaactcaagttgaacacttggcattatagaaaatcaacagggtagctctgcatctatacaactgtgaaacaagcagatcaagcaggtgtaaacaataatactctgaatcaagtgtccactttgcacaagcgggtttcttttggtgcagacatctggtaggcgtacagccaacactactagtagtaaattaaggaaaggatctaggatgatggaagtccggcagggtctagatcagggttcagtgcatcagaaaatggcataccttttggcttttgcaccctgtggcctagtggcatcacgtcagttacaggtatttattggtaaagcaccagcattttaatctggattagtggctacaatcagcaaccaatacctaacaggctaccacactattttcatggctgctagtgaaattgctagtagtgccctatttggtaaattctttctacctcttatatttccttatttacctcttcttctctcaatgatactatgttacgtcagaaaaagagatgctgctaacttttgtattttttttgccgaatagttcagctctcagctcctttttactgttgaatgatgtgctaatgcgcaatgagtaagaaaacggatgctcatgctaacgcacaacggttcctgtcatagatagttaagtggtgtactcaaatgtgaaataaaagatacttcttctgtctcataaaaaaccaacatagtgctggatgtgacataacctattacaatgaatttagacatacatttgtctaaattagttgtaatagaatatgtcacatctagtcctagattcactttttggggatggagggagtaggtgtttttaagattatatataaaggcagtgacaatttacagatatgctgtattcaaacattttacctcacaagacgattatgcttctttcttcatccattcgagctctcgccttctcgcctacaggagctttcattacaaacatcattacaaacagagtgaaaatcctggtgaattttttttaacatgaaacgtcaaacgtgattacgtgacaaacattatagcaaaatagacgatgtcaataataactatcgtaaagaaagaacaatactccgtcaaccttccgtatgcgtaccggatcttgatctcattggccgagggttttccacttttcacgctggtaaaaaccacaaaaacacgtgaaattaaaagattaattttcacctgatgtgcaatgcagcttcgatcggtgacctttgaattcgttgctgctctctcgcacaagtaaacggcttcgttatcgatcaccaaacctcgctgaaccctgacaagcaagaaccaatcattagcgccggtttaatttagcagcatttagcccttgtatttttcatttttttttccgggcctaattacgtgttgacccgagcaacttacctcgctccgattggacgtacggtcagatcgagaagagcatcaagctactccctccgtcccaaaaaaaatcaattttgcatgtccatattcatagaaaaaaattagttctttttgggacagaaggagtagacgacaagaactgctaacccttgaaattaagggcaaaaaattttagaaaaaaacattccaaaaacattttaatttggtggtgaaaagggaagggaaaaagaaaacctatcttacttgcatttttccggcgagggagggagagagcccccgaaagcgaccggcggcggccgcgtctccgcccgtcccaccggccgccggcgacgacgacgacgagtcccgccaccgctaacgtcacctccaccaccaaccccacccccctctccacggccgtactgcccggcatggccgggatccaccggtcgatcgagtcaagagcgcgcgagaggccgccgtgggtgggccccaccggcggcgagtggcggcgctccacgcggcggccggcgagaggcccgctttcgtcgccttccgcccagttgtggtgggcgtggggcccacaggggcgtcaccttggaatcctagtgcaagagattcctatacggtcactgacaagtggggcatggcacggcgtgggccacccctgtcggtgggccgcgcgtgtggtggtaggggtgctccggtgggtggggagtccctatgtttttctttttaacggggcgcgcgcctcgggcgcgtgaacggcacgtccagagccggtggggccggagccgagccgagccgctcccccacactgagccgagccgtacagccgatgagccgcggctcatcttgccaggagcacatcaatccatcagtggaaagaagaagcgacgcaaggcaattatttgcggcaccaccatgatttgggagaaattatggggggcagtgggcgacactatgtcagtagtcaccaatcaggattctattcgatatataaatgggatggaagcataaacaaatttttgtgttgaaatgtcttagacatctttgagagaaacggtgcatgtttggacataaatggagttaatcctaggaaaagtagcttttgtaagggtcctaagggatcatggcatgaagagaatctattatgctcctttttatttagtttggatggatattttatcttcctgcaatcatccaatacaaatttgggattattatgctcaactcaccttagcagttcttttttcaaaacacgcacagtacaaacggatacgctctgaacacataattatccctacaaacgtgcacgcatatacaccatacttctatgagcaccatcagtatatgttgatattgataaagtcattatagatgcttatcactaaaataatagttagacgtatatccaaacacccgtatcaagtttagaacttaaaccaagtgaacatgtttcactaaaaagaacataaatagttgagctattctcacttagtcactttaaattgctttggaaacacatgaatgataaaattttggctttgaggaatcaaactatgattaggaaaaaagaaatagaaatgtcacactaaaaaatattatcataattcaccatattactaaacaaagctttaagttcttatttgtaaccttgcaaaagaatatatatatatatatatatatatatatatatatatatatatatatatatatatataactatactaattggccattctaaggaagctccgtgttaactagaaaaaaaatatatttgctacttacgtagatcgtattatcgtgaccatagattataacaatatttcatattagattaaacctacaattggaaataccatagactttagttttagcttttccaagatttagtaattgtgaaatttagaaatactcctccttcgcaagataatttcattttgcagcatcttattatcccaaagtaacttaatgtttcagcaatcatcgcactggagtatatgaaagtgagagatatagaaaagataaagtggggaaatctgtagtggaatttaataaagtgtaggatattgtattatttgtgcttttgtattggtgtatgtgtgctaaatgaaaattgaagttattttgggagctagtaataaatatgaagttgtaactatcttggtctcaaaaacagtattttcatttatttaaacttaaaattaactatagaaagttgtatctagtgtgtactcttctttatatctaagattctatagttcgaggactaaccgatatatctagcatatgattagactttaatatttataatatcaatattaataatccatgtaacatatgggttgatggctagtcttattaacagggtttgcacacgatactttccttctcttctctattttaagagaggacaatctagtccctcgtactcgactctcttaaaacaaatggctaccctagctaatacaaataaactattaaaagcactgaggaaagggaacattatgggaaatcacaaaggccaatgttctcgttgtttagttggactttgcctttgatacgattggatagatttgttgtcattaaaataactttaaaatttaacccactagttaacaaatttcgctagatgtcgtggtcatggaagaatatatatgatcacataccatccagcaacctagtgaatccaaatcatgcatgtactaaaattcacatccatgatgcatccaccaacctagctcattcacatatcatatatagcagattgatccaagccaactgcaattcacatcccatttaaaatcaacattcaactataataagcatgcaatggtccaaatgtgaatacataaaattttcttttgcgggggtgtatacataaaattagtagcagtcacataacataacacaatagtagtagtataactcctactcctttcgtcccaaaatataatgagttttggttggatgggacacatccatctagattcgtagaattaggatgtgttgtaaaccaacgcgcctattagcggatcaccggatccgttccctgtccctcccacagcagtagaggcgtgagatgatgtagaacacccgcacccttccctttgccctcaattgcagaagtagacaatgaacacaaatatagggtagagctctctctcttcattatagatctcatctgtaatacaagttagccattagccatagatgtcacaccctgctcctatatatataggggtcttaggaggagatagaccttatctctactccggttcagattgacccacaagaaacttatctcctaaagatttgtttcacaacaggatgtatcccatctaactaaaattccttatattttgcaacgaagggactcgaacacatctaaacaccaacaatataaatgcaagtggtcacacacaccgggcaacaataattggggatggtccactactcaagcaagaatccgggctaccaaccggaccaattcactgatcgatcggcttctctctccttggtctgttgtagaaaagatccaaaacccaatgagaggccctgggagatgcagcctgtgcacgtaatggcacggccaatcgcgcatcgtcgcgtcgctgcagaggacttttcgccgtggccccgatctactttttgctgaaagagacggcaagaacgagtgactgcctgtgcctgaggtccagatacctcatgtggggttctttttcccagcattctcacctgaatttgccctgcatagcttgtgccgtttatcttcctttggctgtttattcaaacatgtaccattgagagcaagtttaatagtaccatcaactgttagttctaaaatctaccacatcatctaatagtactaaatcacactaaatacagtaactggctatagtcttgctttacctaatgcattcattttatgaccttggctgtgttttactctgtcctaaaaaaaaagcaaactagtattaggatgtgacacatcatagtacaacaaatctatatactctatatctagattcgttgtcatagtactaggttgtctttttttttaagaatagagagagtaagttcatgttctatttttctattgacttttcacggctgcctcctcacttgcacaaggctgtgtcagaaaaagtatctaggcatcggcgcttgagccggcgacaatttagtcgttcgcttttctctctcagcttttatctctccgccaaatatgttaaaatcttatgcacgcaagctattagcccattattgtacttgctttgatatgtggtatgtagaaggaaaaaaaaataagatcatactagtatttgtcctcctaacacattcagcacatttgtttgacaggagccgtgtctcgaataactgttgttttaaagctctaagagacatggcgatcgaactctttcgagttggtgcaatactccattgttgtcatgaagaattgatatctcaagcaaccaaatagcagtaatactttcctcgcggaaccactttttttttttgtcctttttcttttacgtaaacacgtaagtttcataccacaaacctcttgacccacacgattctttctatatataccatatttacatcgtcgatagatgatatagaaagtaagactaatcctttttttactctgcaaatttgtgacaacagcgaggtgctgaaaacatcaccatcgaaattccgttcggaaataatgctgtcacggttgaacaaaagtaaccaaggtgaccactcgcagcagaggaagaaaagtccaccatccgaaaatgtagaccaccacacaaccaaacgagagcgagaggaaaaccaaacctgcaccacacacgccgcggctctcgtcggcttgagccgagccgatacagtgctcgtgcgcgcagcggcagcagccgcgtcatcttgacgtcggcgcggcagcgagccgccaacgagccgagccaccggaagacgccaccatcagcttgacggccataaatacgctctcttctcactctaatcaaatctctctctctctctctctctctctctcagccagccaccggagtcgtttcgtctcgtctcgtctcctccgtttgagattccgagattctactagctataggtgattccctctggttttttcctctcctcccaaatccacgccctcttcttcaattccctgggcgaaattaatcttttggttgtttctacctttgctctgatcgatctatgtctgcttcctggtatgtatgggtagtagagtcgcaagaatattcggttaggcctgcatgtgtgttagttattttttttaaaaaaatttcttctgcgggtgagttcttgatttccctgtagcgattcgagtctctctcttcaggttgatgtccatggatgggcttcggttagggaattgtttgcgcggttttagttagatctgtcgcgtgtgccctgctttgtttgtttggttggtttgtgggaattcacaagattttttgtttgttttgctgggtttctcgaagcttgtgcggtaggaagtgtgagcgaatttgctgatattttctctttagatttagcttttctcttcaaaaccagatatcgaggtactgtttacaaattgtgacagatattggacaaagttgtagggaagctcatatatgtgattattttctcttccaccttgaagcttgctgcataaactgaaacagttttccatataaaaaacggaagaatttcgcttgatttgttcctcatagaacaccttagcaaacagccacaccctataaacgtagttaattcttttagtccaggacatgaatatactctcttagtatggtacggatttgtatcggagttgctgcggtttaggtagtttcaggtatttttcccacgtaaatctgaaatggttttcacagccatgggtcctactagaataccaccaagctattcagcttgtctcatgcaagccaaggctcaaggtgacacctatgtttgtggtcagggttgtttagttagctgttcgcttggtcatacgtatgaatcttgttttgaatccaatagaacatcacatgcacaggtagcatctcatgcttgtgatgttctcttttcgtcggttaccgatcgtctagtcaactgaatcagagattccaattgtcctaaaaaaatatgtgtatgttcatggctattaagctgaatatgcggtttgtacggtgaagaaacgatctggcatgtttgctctgttaggtacgacatgaacatgctaaattaagcagtaattctatgagaaagtggcgattaattgcactgatccgttcttagttatgcagcatgagatttatgtgattcagttcatctgcttaattgtcaacatagttagcatgacgtgctggggttctaattagaattgctaaaaatttcagtcaagttgctagccaacccatttttgtcaagaaaaaatgatggggggactctgttgatatgtggatgtgcggaagttttgacttttattatgtactggacacgcctttatatttcttaaatatttagaaggtatatgtaattatgagttcaaactaaaatttggtctaataaacatttcgtgattatttattaggtgagaccttgggtttagcttgaattcctgtatctgactaattctgtttaactcccctcttgataaatggaataactagtttgcctacgaaaacaaaatttaaaattttataacgtgcaaaatattaaaatgtatttcttgtaaacattcactctaccgaaacattagtcattctaccgagataaaatttccttcgatgatagtttcgtggtgtgttgtagctgttgtgatcaatgaattaatggtcaggactagctgacttcctcactgcaattaagcttgatcttgaactcctgttgggaagacagcaattaaaattttagtggaaccatgtaatcagtcagagaaacagagattgtacgagcactgttacagaaaatgaaattagaagcacaaaaaacctgtagctcctaaaagtcttcagtttcagcaattcaaagtcattcccaagacttgattgtttgttcttcctgaagatccctgtgcaaagaagtctagactgtccttttctaattatgcatttgatgatactaccaatcctacagtcgtttgtggcatgatcttgagctgacttaccatttccatcctattgcaggacttttcagtctggtaaattttttccatcagacagaaattatctggctacaacctgctgcttcttgatgctcaactaccagagaattaacatcactatctcagatggtctagcccgtcagagttgaagtacagtctggatcaaaattttcctgaaatccagacagtaagttcatggacagggcggacacatcgggttttgtcagtggtggactcatcggtacttcgctgctgctgattttcttccacttcgtctactctccagtgcacatatagaacaagatcaagaagcacctgatctatctttgtctcgttgtttcttccaccttctgtacattgcaggattacttagcctagatgaataacggttttccggaaatcattcgccgcggaaacccgcatctgatggataattccgcagttgtgataatgggacactctgtggcaagctacaccatggacagccatggacggagctcttcttgcctagaccacctgggttcatcaatggagaacagtagtatccatggcaagagaggtaacaaccggaggtcgggtcatggtgtgtctgcgcaagatgacggctgcgggttggttcttggattgggtccatcgccggagatgggctcctccgcggcgcgcaggtcgaaagcgccggcgccggcgacattgttcagccagaggagcttctccttcactgagccaggggtgctcagccttgggcttcatcggggagatcatggtggcgcgacgattcagcatctggaagaagcgcctgctgggaacatcatctccttcgccgccgccgtcgatgagggctcgacgtcggcgaggaggagctccggtgggtacatgccgtcgctgctcttcgcgcctcggcccaacgcgtcggctcctgaagaggctcgtcatgatgtcgtggcggatcacacggacaacaccgtgagtggtggtggcgcgcgccatggccatgcgcggcgtcgcgtcgttcgtcagctcagccctgagcctgagcctgagccttcggcgaccatgacggagacctcgttcggtgtgagctccgacgtggtcacgacggtgaccaatcctgtgacgacgcagccggcggcggcggcggcgcagtcgcaacgccggcatccgaagaagtgcaggttcaaggggtgctccaaaggagcgcgaggcgcgtcggggctgtgcatcgcccatggcggcgggcagaggtgccagaagcccgggtgccacaagggcgccgagagccgcacggcctactgcaaggcgcatggcggtggccgccggtgcatgcagctcggctgcaccaagagcgccgaggggaagacggatcactgcatcgcccacggcggcggccgccggtgcgggcaccagggctgcccgaaggccgcgcgggggaagtccgggcggtgcatcaagcatggcggagggaagaggtgttcggtcgagggctgcatccggagcgcggaggggagggtcgggctctgcatctcccacggcggcgggcggcggtgccagtacccggactgccgaaagggcgcgcaggggagcacgctgtactgcaaggcgcacggcggcggcaagcggtgcgtgttcgacgggtgcctcaagggcgcggaggggagcacgccgctgtgcaaggcgcacggcggcgggaagcggtgcatgttcgagggcggcgggctctgccccaagagcgtccacggcggcaccagcttctgcgtggcgcacggcggcgggaagcggtgcacggtgcccgggtgcggcaagagcgcccgcggccgcacggactgctgcgtcaagcacggcggcggcaagcggtgcagggtcgacggctgcgccaagagcgcgcaggggagcacggagttctgcaaggcccacggcggcggcaagcgctgcacctgggccaccggctgcgagaagttcgcccgcgggcggagcggcctctgcgccgcgcacggcacgctcatggcctcacagcagcgtcgcgccggcggcggcgggagcatgatcggtccagggctcttccacggcctcgtcggcgccatgaacaacggctactcgtcctccggcgtcagcacggcgtcggagtactccgacgcctgcgacggcgcggcgaggaggcaagagctgatacctcctcaggtgctggtcccgaactccatgaagtcgtcgtgctcgtcggcgccgccgccgtcgatgggcaggggcagagagggaggagggttcgtcgtccccgaggggagggtgcacggtggcggcctcctgtcgttgctcggcgggagcttcaggaacgtcgacgtcgacgagctctgaagcagcagcgctcgtgtgagaaaatcagtgtcagtttctgcatctcaaaaaacggaggaaaaaaaacgaagagaaaaaaagaaagagattctatagctcatatagatgttaggttggtacgaaacttcatagattgttttgatgttattatcgtgtcaagattcaagtctcagggcatgaacttgtcaggggatttcaaatgttttgagttcgttgtgaataaaatgtagtagacatgaacttgtcaggggatttcataagtttcgacgtcgacatgaacttgtcagggggtttttcgggtggaaaaggcattaagctgcggttcttgtgaatgaaatgtatatgtaataatcagacatttctttctgctacaatatgcagaatcatctagtcgatgattctcagaaattcaagacgaatatttggttctttgacatttctgaccttgccaaccttgccaccattttgccaatgacaaaaattgatcactgccaaatattttggcaaaaattggctggcattttgttcggtttgctaccaaagttttattttggcccaattcaactaaaccaaataatttagcatgcttttttttaagctacaaacgccaaatgcatgacaaatatattgacattaccattttttggcttgggtaaatttgtcacggaccaaacaagccctaaatgtgttatcgtttcttaaacgctgcctgaatagttgtgaaaaattcttaaacaattagacaacacatgttgttgtattacatatccttatataaacatacaaagctacatttgatctaaccgcacggtgaaaatgagaaactcttttaatcactcgtgtggatatatgtccactcgtttattaccacatattaactaaatgattatgattttttttcaaaataataataagatagattaatacataatatatcactctgcaaacatacgaattttacaagttgtaaaaaacaaatttatctgtgaatatatagagtttaatttgctatttttgttacaactacaaatttggttgtgaatataagcatacaagtaaaagtttaatttgttaattttgttataatttgtagaagttaaatttgaactcgtatgtttgtagagtgatctattacatattaatcttttttatcagttattttaaatataataatttgattgacatgtagggggtgtttggttcatggccacactttgtcacaccacacttttggctgccacagtttgttagacatgtgtttggttcactgccacagttgtggcttgccacacttttttaatagcatgttctatatgttataggctcaattttttttgtcaactttaccacactttgtggctagcaatttgtccaccacacttttgtggctgtcacaacttacctaacgttagttgtagtacagtatggccggtaaccaaacacacccgtaataaatgagtgggacgtagggtagtttgcatgcccttgagagcttaaatagctttccctatgcttctctacgacggtggctttgtcgctgatcagagttgcaatataatgttcgtcgaatcactatttttgcacagccgaattgcgttgtaatgttgaaacaactacgcccatacattgcaattgcagcaatgcagcatccaactctgttgcacgtagtagtagcaactagcaacaggtgttggttggtagcaataagtgcacaagccgtagccagaaatcttcacgacacaactacacagatgcgcaacagcgcaaagcactacagcagatcaggcaaaagtgcagccattttagctgattatgcacaggagatggaagcaaagcagacggcgaaaatgcggcacagcatgaggcgctggaccaccgtatcctctcactgaaaacctcgagaacggaaggtctcacacaaaccaagatggagatcgctttaaatccactagacatcaccattgcctttgcatctgcatataaagcagcaggtggccactgtgcaggctgcatagcgagaagaagctaggctttgttgtcaacatggcaagagctgtgcttacactgactgttcttgccttcttgtgccttgtggccctcggcttgtccggcagagccaatgccaatgcaacggcggggaggaagatggttggggtgtatgagctgaagaagggggatttctccatcagggtcaccaactggggagctactatcatgtctgtgattcttcccgactccaaaggtatatggttcttctgaattttgcagttgagtttgtggaattgtggtgcatatcctctttgtttttataggtgcttttatttagcacattgcgacttcatacgttttgtggtgcataatccttgttttttgtaccttcagagcatttgtgaattcatacgttttggttttcttttccctgtagggaatttggctgatgtagtccttggctacgatacagttgctgaatacgttgtaagatcatacataatcccctctgtttcttcatcctcttcccttcttgctgatcagtgatgtattactacagtatatatagataaacagatctcaaacaaattgttcactctcaaattaagtggcccaaataaattttcttttctgaatcaaagttggcttgtgaatgaatgtggcgtgcacattaattcagaacgggacggcctacttcggaggactgatcggccgcgtagccaacaggatcgccaacgcgcggttcacgctggacgggaagacctaccggctgttccgcaacgacggcaacaactcgctccacggtaacacaggccgcatgtgtacagtgtgatctcatcccctgtgccggatcgccggctggctaaactctttcagtgatctgtcagtctagctgtcactaactcattgttcatgcttcatcgtctttgctcttgctcttgctttgcttaggtggtcaccgtggattcagcaaggtcatatggacggtgaaggagcacgtcgccggcggcgactcgccgcgcatcacgctgtactaccacagcttcgacggggagcaaggtagtaactgatcgatgatctcgtgctagcctaattggctaatgatgaattgcatatattatgttctgtttcttcctgcgataacattttttgctttaagaaacacctgagcaaactggatgcatatttaactttggcactagcaaagtagcaagcacttccaacggcatcctgcggtccacttctatcacatatatattcacattttgagggggaagtgggcgtttttcctgcatatgcaatgtgctcttctcatcctttctcatcatggaaaagcttgctgtacttccacgatgtgttgcagcacagcgagcctcatgcgcacactatactactaaagacattatggcaaacatttcaggaggataaaaaagaaaagggaaggcaaaaaagcagcagagcactactgcaatttgcatatagtgcatatgcatgcaactcatttttattgagagaacctatcaagtgctctatcgacaaaaatcttgaaatattagtactagcagtgtagagcacaatgtcatcaaacattctgcacattttaactcgaaccatagcagtacgaatgcgagagaattaatctataaacccaaaagcatatgctgaaatttgtccaagattgcgatgaactgctgctatgaaatgttatccaacatcgtctcccttttttagtatcttttttggttaaccaggttttccgggcgacctggacgtgttcgtgacgtacgagctgccccgcccctacgtgctggccgtgcgcatgaacgcgacggcgcggggcaaggccacgccggtgaacctcgcccaccacgcctactggaacctcgccggcgagggcagcggcgccgccagcgtcctcgccgagacggtgcggatccacgcgtcgcggtacacgcccgtggacgccgcgacgctcatcccgacggggcgggtcgcgcccgtggccggcacgccctacgacttcctcgccggcgccccggtgggcgcgcgcatcgtcggcgccgccgttcccggcggcgccgtctccgggtacgacaccaattacgccgtggacggcgccgcagccgacggcgagcggcggcggctccggccggtggcggaggtccgcgacggcgcgacggggcgggcgatggaggtgtgggcggaccagccgggggtgcagttctacacgagcaacgggctcgccggcgtgcgcggcaagggcgggagggtgtacggccggtacggcgcgctgtgcttggagacgcaggggttccccgacgccgtgaaccacccgagcttcccgtcgcagatcgtccggccggggcaggtgtacgagcacaacatggtgttcaagttcaccttctagtgcgcacttgggcggaccgtacgtagcagcatccgatccgtgcatgcgtgcggctggtcggatgtgtactgtcacgttgagacctgtagtcctgtactgaaaaggaataatggcgtgcgcttgttgctttgctccatccatgactttggtcaaccagtgaagggtcgacggtgacttcagtatcggaagtcggaactgctagctgtgtggggagtttgttgcagttctttaatcacaacctcttccaaataacccagattttcgttcacatcgtgacaactgagaaaatgtagttagactaaaaactaaaaaatatctttaaatttttataagctggttatcaaccaattgcttcttagaatcttaagattcctcaaaaatcttatattcaccaacatattgtttcactaaaattatacgatacaataattacagtacaattagttgtctcgaaagttccaaaaaaaaaagtctcaaaagaatctcagcttgtctccaaggctgcggcttcactgtttcgttgttgtgtttccttccgtgttacgtagagaccatcggtttgtcgattcttttttgtggggccccactataaacggagattacaacttacaagattattctctccgtctgtcaccaaattacatagttagcgattactctaattagcgtggacctccaaggaaacaaaagcgctaaatagaaggcaccaaataaaaattaaggcgccaaaccacagaaaatagattaagctttacatatggcacattattatcggatcacaatcatcttcttcgcaacaacaatggcctctctatctaatcttccaaggtcaaccaagggggtgtacatcctagggaaaccctatgacgtccctagaccctagtcatatttattcaatagtcgtcattgttttgagtcgggttttgcttatattatttttgccattgcaatttcgccgctagatcggtttgtagaaccccaaattcgagtgtttaatcattcatatgcaactgtgttgcaatatatcttgttcttgcttgtgttcttcgattcgcatgcagggattagccttctcggcgaggtcaaccgggcagtgcacggttgataaccagaggagacgtgctgctacgattgctgggttcggatcatgttgatcggaagccggatcgtgtgtgtcaagtttccatcaaatcaagagttatcaatatctatcggaagatcgggacctagcattctcatcagcggcttcgacttcaacctccccgtcgatggccagagatgcctcactcggttgatgaccatgtatgacaacgacgtcgacgcatggcagggcctcggccccggcctcgcgcggcggtcgcccagtcccctccggtcacggcggcggcgagcctcctagctggcccgcggcgatggctggacgcgggcgaggcaagcgcgggcgccttgtgcggtggccgcccggtgccctccccactcgcggcgagcccgacggcctggcgcctctccggtcacgacggcgatgcgaagcgcgcgggatggatagattgggggcaccatatccaccgagattgatagattggggattattttagacctacaggcgggcccaagcaaaggagtcgttggatttgttttgggccgcaagttgactcaatgggaagaacgtaaacacatgttgtttcttatccgaaagacgcgctagacagcggtgtgttatttttagaaagagatgcgcggccgaacgatactaattacggaaagaaatgggtcgctcatttagactatcgcgcgaccacgcgctgtgtagtcgcatccattaattatggaccatatttttccctttagcctttagtcaaactaggaaggtagcccgcgcacatgcgcgggcaccttacttaatgtggtgaaattttcttatgaatatttatgtatgggtgacttttaataataatgcttttattatattctaaactaaattaaatttacttattttgctttgaacgttggcaccatcgctacatataaattctaaaataaaattacttgagatcgtgcagttgtgtcgaaacaatgtatgtggttcccatgagaaatttttttatatattttgactgccctgaaagatatcttgcaccccctcccgcccacaccctccaaaatagtccaataatgtcatttattactgtagttaatttttatatctattttcattctaacaatcctcctaaaatgtttgaatttttctatttagaatgagttttaaatccaacaacattttttcaatttatttcatgtccatttttttttgagatttatgttttatgaatcatcaagctttgatcttgcaaattgggatgaaaatagaagtgcatataaccttgcacagggtaaaggcatatgtttaaattttctctcgtgtattgaagtaatgatcatagattcatagtatttttagtgaattctcactaaactgaagtctcttataacaaatagaaatttctagattgttctacgttaaatgtcaagaatttacaatgtactatagcaagttttaccaaaaagaaaaacatggacaatgttaagagaaattaattaagttggtagaaagtcgttagatgtctaacaggatataagtaataggtggagatccatttgtggtttttctttgacatatagataatttcaattttaattgtcagggagataaaaaaacagagagtaaaggaatggtgcatgccacacacgggcagggagggaggaaggtttggcatgtttttctaaatgattaatctaacgacctaaatgatttgtcatatgtttaagtcgaaatcgatggttggaagttttcttttcttgtcagaatttggaggatactgtctcacttaaaagagcaatgtaacagcttaaagagtgtttataagatgtataatggacttttagcaccgcatgccgcaaaggagcgggagggagggaaggatgtttggggtgtttcttttataaaaatagatccaatgaccaaaaatagtgtgtcaatcgattcaaaataatgtgtccaacgatttaagtcaaaaccaatggttagatgtgtccttttttcaaaatttctatgattttctctaatttaagaatgtcgtttaatggcttagaagcgtttatgcgatgttaatgggcattaacactgcacagggagggtagggaggagagaggtttgagatgttttttatgaaaaaattctgcaaccagaaacaatgtacccattaatttaaatagaaacctatattcagatgctttcttttctttgtctgtttttctattattttccctaatttaatagtattttctctaatttaatagcaccgtaggatattctaagtgacagtttgagagccgctagacctagtacgtggaggtctattgtgtgttcttttaacctgtaaagataattttgatttacgtacgtatgttcgcactggacgtggaggttccggatgtggttattttacagagatctaatgatataaagcaattaatgggtccaccgacttagataaaaattgatctgaatgtgttctttttgttttgataaaataggtctaacaggctaaaacaatgggtccactgatttaatgaaatttgatggtcgaatttcttaatttattagatcatatctataagttagatgctatgatcgatcatcttatttatcgaccaattcatgtagatgttgacagaagttacttaagtctacacaaagttgttagatatctaacagtgtatgagtaaaaaattagggtggcatattttgattttattttcttagaggcctcaagatgaatgtgagttcagcagtaataattttgtagcgttacatcatagtctatttggatcttaattattgatttaattaaaaaatacaatggtacaaataggtcataaattgaaatataatttaaaagttacaactatttaaaagattgtttatctatttatagaactaccgaaaccaataaattaatatgcatgcatggccataaaaacattggatgtcttttaccttaactaacttaactaccataggagagagaaaaaaacaacagaagggagggagggatggctaacatgcgtgcgcacaccgaacagagaggaaggtttcggactacttttttcgaagatagatctaactaaatcttttttttagaatttctaacaatttttttattttgttagagcgccacatggcagcatatgagcgtttgtaggagtgccacgtggcggattaggagcgtttgtaggaagtttaatggacttttagtatataataatagaagatagataatagatagatagatagatttacttttcctaatctgatcatatctctattattataaaaattaaagatgtttttgtcggtattttggtacgtcattcgtatttgagttatttttaagttcgttcgcttttgaaattgaagatgtttttgccagtattttggtacgtcatctatgtataagttggttttaagttcgttagcttttgaaaatgcatatccttatttgagtcgatttttaagtttgttcgcttttggaaatacagaaggagtcgtataaaaatctctttaaaaaactcgaatgttaacttgagatgaaagtcagacttctaattgaagctcatgattttcttaaaaaaaatctaagcgaattttcaaagtgaattttattctataataagattaaaataacatttagccgtggttgcaacaggtattttttctggtgaataaaaaatgtattgtcatcgagccggcgccgcgtgtggtccgggaagaactgaactacctggcgtcggctttccggctgggatctgtcgaggtcgtcgaggaagaggaacgagcccacggcacagggacgcctgctggtcgccgcggcgaagtcccgccgggtgttcccgcctgtagctaatattcgtcttgtttacttgcacgaactgaacactccattgtttagcctgacgcctgtacgggcccattgttacgctacgctgaggcctgaggctggtttgtctgtttgtgaaaagtaagatatatatcgtcgatgccactggtgtcgaccgtgactccgagagtgaagaattctactgtcaaagttgcaagcaacaaagacttgtgaggcctgtacggttgacaactctcgataggcgaccaatggcagacatgcatgacgttgaggttggcaattagctcaacgagcgaccaatcaaactttgggggtggtttactgatcaggactatgtctacctgttggctcgtttgcgcggcgccgcgttgaagcgatctgttgatctcgcgcggtggatcaccgaggccgccttccctctcatcgcgacgacgatgggaggggaccgagggaagaagccggtggataccccggcggacatgcttcttcccagccgcaaaaggtggctcggggacggaggttcggatcgcgctcacggcggctgcctgttttacgaaactactccttcgtccttcacgcatggttcttcttcctcttcccccaatcgcccgctgcacgataggtacgtattcccctttgtaaattttacctgctaccattatagagttgcaactagagtcttcgtatgcttaattaggggggagttgaaccaacgtcttcaactcttcaaattattagagcaagtttaatagtatagcccactactagctccatttcatctatagccaatttatataatagttgcttactatactattaatatctggttaaacctgtcatacacaccttgcgttttggagtccgtgctacaaagatctgtagcccgctgctcttctctcttatcgtttatctcattaaaatatgtttatagcgggctaatagtctgctattatacctgctcttaagcaaggagactatttaatttttttcccaaaacagtcatggattcaaagtactaagtggtaaacagtactacatccatcccaaaataagtacagccgtgggtatccatgtccaacatttgaccattcgtcttatttaaaaaatttatgaaaaaaataaaaaaatagtcacacataacgtactattcatgttttatcatctaataacaataaaaataccaatcttttaaaaaatcaaataagacgaacgatcaaatgttggccatgaatattgcaaaactacacttattttaggatggagggagtatcaatattcagaagtggtaccttcaaattcgttatcctctctccaagaaaaaaaaatcattatcctctctgcatattgttttcattttaaggaccaacaccagatagtactttattgaatagagccagaaaaaaattacaagattagtatctaaaaggcactagtcaggaaagaaaaaaaccacaaccaccacacaccactcaccgatagcgcctttacataacccagaaaaagattagcactggaccaaccgccgctagaccaacaaaggagctaccgccaaatcgcccaaaaccaaacctaacatcgagcatcacactcgactctatccatgcccatgggattggagaggagagagtgagagagaagatggaaccactcttcccgacaaggcccaccaacatggtcaacatgcatagactagggcgtcaccacaagtggacaaatgtctagagcgagcacacacaaactgcctgagagagattttggcggggtctccaagacgatgtctccaggaagagaagagacgatgaacactagcgccgtcatccatcgatgtcacgaaggaccaagacaaggctttcaccggaaatccacccgatggagaggggcggcttgacagcgcccacagtagggaaaacgacgtccaaagacgccaccgctgccggctcggctagaccgagctagtttttacacctgttgcccaccccctgccgatccgtggacatagttccaaacctccaccaccggccaacctccgtcggcacgcggccactgctgtaccaacgcccccacccaccccccacccccctagtcagcctcggcatgcaatgaggcacactccgccgtcaccagcctcccaaccaccgccgcgttggcctggccatgtcgtcgccgcattggcctcctgcgctgtcgaccgagccgtctacttgccgttgcccgcatcaacctcccaatgccgtcgcgatggccatccatagctgccgatgcagcccactccggccctccgcgctgccacctccacgtagtcgccatcggtgactcgggagccggcctctctgccgcctccacgcagccataccccagcctctctacaaattctgtccctaatagcaagatccaaaaaaggaagatgaatttgaagctgttttgtttttcttaaaaaaattgtgggtttaaatagcttaagttaaattttcaaacgctgccgtatatcgatacagttttctaaccatatacctatttttttcctcacttgaaatgaactgcacactgcggcgtacgtacatgaaggatggaggtggatacaaaggaatcagagataccaagacagaggacagaaaatgaccgaaagattagtgcccggatcaaaagaagtcatcaagctcgcaggaggcaacggtacgaggaccaggaagaccgcgtccacgggaacgttcatttcgcctccatatgccctccaccggtgtcttggctggaattgaagcacaatatggaggttaagctagacttaaatcttgatgacatagagaaatctattgtcattccaagatgccaagagatggacacctctggtaacccagacaaggtggacaaatacctcgtcgccgccaagaaccttacacgaatactgaacttggagcaccctgtcctaaccgaaactggacatctccgtgaccgtgcaagatcactccacggcaccaccatctcttccattatcacggagttttgctacctcaaagtctggagggttagtccactaaggcgtctgggctacttgccaggacccatctgggagtcctccgtcagatctacctttaatgagtcaatctcagcaacggtgtcgtcgagctcctctagttccttcacctgcagtggtagcaccaacggtagcagtgataataatcaagcatctcttgaagatggaccagacaaaagattggcatgcactggttttattaacatccaatccgtttctgtcttagatgacattgcaagcatcatcactgagggcggatatcagcaactcctccgaggagctttcgatcgacactactccgaacttgcaaggtaacacatttactgtatacatccgtcaaaataatcactttagtgatatttcttaacagtagcacaaccgggatattgggttgacactagtgcagagaaggctatcattgatggttcataacctgcatcactgccggtctttgaaccaacaaagacctgctgtgttaaaaaagtagtgtatcatacatactctaaccgtcattcggattaccactgccggttcaatacgtgaactgaagtgatcacttcttcgggcaacaaagataagtcatagtccagaatgctagttggaccgtttggtcattgaaatttttttttgaacgactcgcacgagacggtgcgaagttctattgatagagcagaaaaaaattacaagattacaaccctggagggtcataaccaggaaaaaggaaaaaaatataccaccacccacacatcgacagcgctaacacacaagcccaggagagggcaagcaccagaccggccgccactaagcgtgaccgaccgccgctagaccaacaaagaacccagacgagatcgccccctaggggatgccaaaacgacgtcttcaagaagagaagcgacggaaagaccgccgccaccgtccgtcggggctcataggagccaagactgggctttcgcccggcaaccaccctcttgcgaatccacggctggtgccccgatgctccaccaccattcaagctctgccgacatgtgggaccccagcaccggcgccccccgtcggccagccttcgtgtgccgaagaccgcgccacacccaccggtagctctccctcacaccgaggtcgcctccttcaccgccggccgcgcctctcgcgccaagccggcctcgtccaccagacgcgcctctcgcgccagtccggcctccctccatcggccgcgcctcttgcgccacgccggcctccctctccgccgcccgcacctctcgcgccgagccggcctccgcttccatcggctgcgcctctctgtgccaagccggtctccgacccctcctccaaacaatgccgcgccagccagaagtagccgtctgccacgccctcggctagccaaccgaagccatcatgcctccggtgaccgcagacacggtcaccaccaccgcagccgctgctgccgaacgcccgtcgccatccacacctcgcacccgactccttccccgcctccactagctgtcgccggcgatcgtctgcacgacgtcgccagccgctgccgcatccggcgacctcgccaccacctcacagacacgaccgccgcaagccggccgccgtcaccgctgccgctgtcaccagccgccgacaccaaccgccgtctccgcaaaccgccgccatcgctaaagaagccgctgcgccgtcgccctccgccacaagtagccagcaaaccccgccgccaccagcgccactgtgccggcctccgcctgccgtgcaccgccgccaccatgccagcctctgccggccacgcaccgctgccaccgtgccgtgccgggttgtgccgtcgctggccgagccgctccgccagtgctgcgccagccgaagccgccgccgtcgaacgggttctgcgcgtctccgtcggctgcgtagtcggcctcgcccgccgccgcaccaccgggcgccgcctacgccgtcgccactgaagccggccgctcctccttccccgtcgccggacgcctccgccgcgcggggagcgtaggggagaccagatccaggtgggggagcgccggatccggcgctaggggatccagatccggcgtcgccgcacgccggcgagcccgccgtcgcggcctctaccccgccgccaactttgcctccaacgccctcgccgccactgcatcctctgccaccccgccgcctccttcaccccgctgccacctccttcaccctgctgccacctcctccaccctgccgccttcttcacctcgccagccggccgggcaggccggcgccgccgtcttcgcgccccaggccacgtcggtgcccccaccgccgacgggagggagagacgaagccccgccgccgccgtccttgtggctgcgtggctttgccggcggccgctcgggcggcggcgaggcggcagaggtaggagggggagcggaggacggcggcggcggtgtccgcctcccgtgtcacccgtgagggaggacgatgcgggggcctctttcctttgttcattgaaatggtcctggcggtccggtccatctcgatacccagaaaatcaagccataggtccaatatatgtagtgcacgtatacaaaactgtcaattcagccgatgaactattgagtatcacaatcagtttgtcccaagaatatattattgtcgattcgtcgcataaaccgacactgatgcgcttgatgaatcttgttacctaaatattattactctaacaacaaataaattaacttggactcttgttgatgaatcatgttacctgaatatttatgcattatgcagcacatccacatagattatggccttatgttgggctaattatggatttttttcaaattatgcttcaactccttgcatggaaaatttcagtaaaaaaaaaactccttgcatggaaaatttttggttaggactgttcatttactccctccggttatggaaccagagggagtaggctactaatattatttgagtcagtttgtctgaagatgcattcaaattgccataacttcatgtacaaagcttcatatcatatcgtttgtattcttggaaagtagacttgatatttattcaaatatgaaggtttggaggattggattatttgcaataatgcggatatctccttgaactttatatatgtctatataatagaactgcacatggcctggctagcatcccttaatttctcacttgtgcacttaatttgcagctttaattttagttggtttatcagagatgaaagtttctcggcgtctactaatgaccagacttttttttttcatttttatacatgtccaatactccaataccaagcagatattttgaaattcttgacatagaaaatattttggggagtcatatgaaggactcggtggaaatcttagtgaacgcatgggtacgggcgatgagaatcactctcaatgttcttactgagatgcgacggcagttacacaaacaaaacttcggcgcattcaattcattcaagcatgactactttatggtgattgcaacgcaatccataaaaaaattggttgcttgtggtagttcaatgtgcagttggcagcaaaactcacaagacgatccctccacgcaaagctgtgctgcccgtgaatcaacaaaacatactacacagatgatactgaatttagtcatgatgtacagagcactgaattacgccatgccagaactcttggcattgttctcggggcgaactgagcagatcgttcttgcagagtttcgtggtctaatcgatcgatcatcatctacggtgctccagttgttcatggagctaaacaacttgataaaatctcaacgactggtcatggttgatattggtgttcatcatattactcggcatatcacagaatatatgcgggtgctatttgaaaagaagagcacaatctatcaaatgttggatagtaagccaaatgcatttggtgaactagttatgggattggtctcgtctttggagtctatgttggagatgaactctagaagtttggtacttcaagggcagaaacaggtattccttctgaacaatcttcatttcatgattgagcaagtaaagagatgtatagattcgggactcattcttggagaaagttgtcttgttcaacgcgaggaccagcttgatcaattaatcacagcttatatagaagcttcttgggatccagttatttcatcgttcgaaaagcgaactcaagtcgcgataattttgtggccacatcaattgtttgacaagtttaattcttctttcgagaggatctacagtgtacaaaagacttggaaggtgactaatcctaatgtccgcctgaagttgcgtgaggcaatcatccagaaacttatcccagtttatcaaatgcagatgggaaaccaatcagagaagaaacaaatgtcagcgaggtacagtgtggagcagctggagtcacaacttctagaaatgtttgagggctgaagcctgaaggcataaagatcacataatacagtaatacacatttgtccgatatcgtggatgaagcagatttcagtgatcaacaatatcgacgagtttgcttgcgcaatctaaaattcagctttccttttcactgcttggctcagcaatcagatgttcgttgctacctgtgttatctggtccaccgttgtctgtgatgtcaatatggcttcttacttaggctggatcctttagttctatttaattttgaatttcaagttgtatggaggtacagaacaaatataagtgtctttaattatggagtcaatttaattgtttatagtttgaaataaaggggttgttcattttgatgccaaaataaaccttgtacaaagcttagtaagatagctattttagcaagatagttattttagcaagatagctattttggatgtgttcactttgttgccaacatacatgctacccaattttggtcattactgtgcagttgccaaatttctggtatatttaccaaagtttggtaagaaaccaaacatatgtatatttttcacaactttatccaaaaaaatggtatggtttgaaatggcatcaaagtgaatagccccaaaataagaaaaaccattgatcgagcggtcatagtttttttttggtgttggtgtcttttaggacaattgcacgtttgacctcattcttaatgttagatcatattcccttaacttactcatttgacactctttttaaaaaatgaagatcccgtatgaccctaaagctggcggttttgccgtcagccgattggtccaaattgccatatagtttaatgacgcgtggagaatggtgccgcagcgatagtttttctagtgcgggaaactgggaccttctggatctctcgtgaacgcgcataactacctgtgacaaatatcattccacgtcaagatggaaatagtcagggtcaatccatttctcccctaaggctttgtttagctgggaaaaatttttgggtttagttgtcacatcgaatatacggacacatatttaaagtatcaaacgtagtaaaataacaaaataaattatagattccgctaggaaactgcgagacgaatttattaagcctaattaatctgtcattagcaaatatttactgtagcatcacattgtcaaatcatagcgcaattaggcttaaaagattcgtctcgcaatttacacacaatccgtgtaattgattttttcccctacatttaatactccatgcatgcgtccaaacattcgatatgatagcgtgaaaatttttgttttgggaactaaatagggcctaaatctatccgtagatttgctccagctgacctttagaattgcttaaaagataagtggatcaaacgaatcaaaccattagaacctaagttctagggttcaacccaaaataacttcacatgtatgaaggtctcgaaaatttatacaaagttgcttttctatataataaattatcctacaaatttcaattgaatttaacaaattttcgtagtgtgaacatgagtttaaaatttttgggtccaagtggtacacttatgtaactataatttttggtctcagtaatgcatcgtgggtctcgcatgtctaaatatacaaagttgcttctctgtatacattcctacaaaattcaagtgaatttaacaagtttttataacgtgaacatgagtttaaaatttttgggtccaagtttcacacatataatggaaatttcttattctattagtcgtgcattgtgggccccacatgtataaatggcacaaaatttacacgaagttgcttctttgtgcaataaatcattccaacaaaatttgaatgaatttgacaagtttttatagtgtgaacatgagtttaaaaaatttttgagcccgagttttacactgatgttataggagtttcttggtctactactaatatagcttatccatttggatatctatggattaacgattaatataatggactcataatggatcgatcccgttgaatcatggatcaacagactcactcaatccacattctaaaaattcccatcgtgaaatttccacgcgatcggcctaatgctccaatagtcatgttggcccatcatgtttatggacaagtgtgggctgagccaaccgcgcacgctaagcttgctatgggtgggcattcggttaaactgaaaaagtcatgtcggtctttcgtccttcggtcagttcagtcattgattgaaaagtgcagactaaataaaaacgcaaaattgtgtcacgaccaacgaattcggttctcggtatctgtcctgacctaactgtgtcaatttcaggagataaattttacaatgataaattttgggagcacttaacctatttttagacaacatttgatagttatataccacaaaaatacaagataataggcaacataaaaaaccaaacaatatatcacaagttaggatcaactagcaagaataaatcacgagaatcatatactcagttctcaacttcatataacatgcagtacatcacaaatcacaattcagttatatcggtcaattcgcttaatcaaagccactaaccaaattaaccgaataaattttgttctttcgttagttgagaccgaatttctaggtctcggtcttggactttttggttcggttttattctgctgatgtgaccaagtgttaacaaccgaatttggtaatatcagcatcggaggtgaggatgggatcgaagcggagtcggagataaggattgttgcgggaacagagtaagaatcggttggagtccagatcggctaagaccagaatcggctaaatctaaatcagactgggttaggtgatacagccgattccgacaaaacgacttggtgtacaacatcgggttgagtcgatatgcttcaagatgattgccgcacatggatagagtcctgagaaggcaattgtatctattaattaggatgttttacgtaatttccttagagatatgcttagggcaaaagtccgccgcaaagacttatggtatcttagagtttgttacagataatagtcgtgtccggtatggacatatcttgtaattctcggggtataaatagacgccgagccctatgtaacaaaaaagaacacacgttcaatacaatctcggcgcatcgccacccttttttttgctttagtcttatttcgacgagttcttactttcgggttgagctgcatcggtttcgatcttcaacaggaggtaaaacttgttatgatggcttgcattctcgggattagtgcttccatctttatgacactctaatcttgtttatgtaattcgttgagttatcatatatcctacataatccctggcaatattgatatctaacctacaatcggctaaacatccgtcaatagaaggcagccgattaagttaaataccgatgttgacttagattttataggatatctaccactctatgacacatccaacggcttgattgtctagatattgtccttcttttcatacttatagctgcatcagttaagtttgatcttatgagtcatgattagaatctcaatctctagcctgcttctaggttgctgattagggtagcatgggagtttcagccgatcttacatgatttaactactttttatcctatatgcttgattgacatgttaaatctgccctttacgttaagatcttgctgcatttaagtatattaggctgttgtttagtatattctacttgctttaatatcttaatataaggtggtatcgaagtattagccgatacatgctagatctatctgatcggctatgctatgaacgtatatagtctcattattaatatatatttcgatctaagtgatttatactgtctcggcatagcgaccgatctatcccaatcacttgatttaagtatatatcaatataaagattatatattgttaatatctgcagtcgatcgagtagatttagtcccttcttatttattaatggctgccgatcgatgtatgtatgacatcgactcaaagataaatgatatgtcatcggcacctagccgatcggctatcatttatagatttaaccgcgatttctttgcttctacttcttgttggttacaggatcaaatcaactggcacgctagcacacccgaaggcgagctttggacctacactagagttaagcagatctcccaggcctcgtgttttctatcaacacgcttttggcacgcctggtgggaccactaagaaatcagccaacaatcctccctcatggccgaaaaaccaccaccaccatctagcccaggctctgttaaggaaaagatgctgaagttgggattgactgatgtcaatgaaggaaacgtcgtgccggttaatccagaaaaattcacacctgagcagaagaaagagtttgaagcaatgttgcagcaagcacgggatcagttcttgaactcattcatgcagaccagcaaggggacacttgtttagaagtacaaaataaaagttgttgctgatgatcctgcgaccagttcttctaaggatggagatgggaaacaagctccagacggctcggctcagccgagtatcaaaggtgctaccggtggctctctaggaaatcaaggagacaattctcaaggggtccatggaggacaaggtgacggggtgcatggagttcaaggtgacggtgctcaggggctgcagggaggaaatcttaatagtgatgtggcagaagactttttcaataacttccaagatcgggttgattacgttgtacatcatgctttgatcaatcagtctggggtgttagtcaatacccggtctatttgcaaggaggtgttttccaaattatcgttctttgattaccgacgttcagtcatctactcaggcagttccctccgttacacccacaactcagccgatggcaccggcagcaactcccgtacctgctacatcagctatggcgctaggccagccaatgaaccctcggctgttaatgagagagcatccacagcatagtgggcaggttgcgaatcggccaacctaagatcaggttgctgctatgtttttgccgcctcaacatgcagttgatctaatacagcagcggccgattcagcaacagccgattcagcagacaccccaaattcagcaggttgtgcaaccaatccagcaacaggtcatgcaaccagcacaaccaatccagcaacaggtcatgcatcggcggtagacgctctgaaagttaggttattccggttatctctgtctggatcggcttttacttggttttcctccttgccatatggttcgatcaacagttgggccgatttggagaagcaattccacagctatttctacagtggggttcatgaaatgaaattatctgacttgacagcgattaagcagcggcatgatgaacctgtgcacgagtatattcagagattcagggagatgaggaacaaatgcttcagcttgagtttaactgatgcccagttagccgatttggcctttcagggtatgattgctccgattagggagaagttctcgtctgaagactttgatagcttgtcacatctgatacagaaagtaaccctgcatgagcataggtctgcggaagttaggaagagctctaagagagttaatcatgtttgtccatacatatatggatcggatgatgatgaggatgatcctgaaatagctgcagccgaataggtaaggagtaaaaaagtcataccatgctaatgggtgaaaagttctggaaaagaggagaagtatgattttgatattactaaagctaacaagatcttcgatctgctacttcgagagaagcaaattcaacttcctgctggtcatacaatcccatcggctgaggagttaggcaaaaagaggtattgcaaatggcataattctgggtctcattctactaatgattgcaaggtttttagacagcagattcaggtggccattgaggggggcaagattaggtttgatgattccaaaaagctgatgaaggtcgatgataatccttttcctgttaatatggtgcatacagctggccaaacaaccgatagggcccgcgcaaggggttttcaggtgaattcggctaagattatcaacaaatatcagaggaagtatgacaagcagcaggagaagcattatgaagaatacgatgatggttttgatcctcattggggttgtgagttctttagattctgctggaatgaaggtatgaggttgccatctaccgaaaactgccctaggtgcagtgatattgtcgagagctcaagccgatcatataataggggtaatcggctgaggcagacaagagtttctgttcatcaaagattgggtcctgtgaatgaagatcatggccaagaagacagtgtggtcaggaagaatcaatggtgtccttctggtattttcacaaagaatcagaagagaagggttcaaagattgaggaacagagaacgccttcaggaggttgaacaagagattaatcatcggctaaggaaagcaaagccaaggcaggagtggcgtgttaagaatcaggttcatgtagccgatgatgttgcagtcaatgaggcaaagaggttggcaaaagggaagagtattgtgacggcactgattaatatggtctttaccttgccagccgaattcgggattgatcaagccgatgtcgacgaggtggaagaggaatcggctaagttggttctgtcaccagaacaggcagtgtttgagaaacccgaggggacagagaatcggcatcttaaaccattgtatataaatggctacgtcaatgggaagccgatgtttaaaatgatggttgatggtggggctgcggtaaatttgatgctttatgctacgttcaggaagttgggtagaaatgccgaggatctcatcaagacaaacatggtgctcaaagacttcagtggtaatccatcagaaaccaaagatgttctgaatgtggagctgacagtcggcactaaaactattcctactacgttttttgtcatcgatgggaagggttcttacaacttgttgcttggaagggattggattcatgctaattgttgcattccttcaactatgcatcaatgtttgattcaatggcaaggcgacaagatagagatcgtgccagccgacaggtcagttaatattgccagtgccgatttagctctttgggagatggatgaccttgattgtttatctggaaaagtctgggatggggattttctaaaagtatccgattctaatatacagcccattgaagatggagaacccaagctattattttgagggcgtcgtggagggttcaagtgtctaccctaaggatgcagtagatgatctcgttgacaagcaaggtcaaggtttcatgtcggccgatgatttggaagaaatagacataggtccaggcgatcggccaaggccgacatttattagtaagaacttatctccggagtttagaaccaagttgatagagctcttaaaagtgtttagagattgcttcgcctggaagtattatgagatgcctggactcagccgatcgattgttgaacatcggttacctatcaaaccaggggttaggccacgccagcaacctccgaggagatgtaaagccgatatgcttgaacctgtcaaagctgagattaaacgattgtatgatgctggttttattcgtccttgccgatacgctgaatgggttctagcatagttctagttatcaagaagaatggcaaggtcagggtgtgcattgatttccgagatctgaataaagctacaccgaaggatgaagacccaatgccagtagccgatcagctggttgatgctgcatcagggaacaaaattttgagttttatggatgggaacgcaggatataatcaaatctttatggctgaagaagacattcataagacagcttttaggtgtcctagtgcaatcggcttatttgaatgggttgtcatgactttcggcttgaagagtgctggagctacatatcaaagagccatgaattacatatatcatgatctaatcggctggttggttgaagtctacatcgatgatgtggttgttaagtctaaagaaatagaggaccacatagccgatttgaggaaggtttttaagagaaccagaaaatatggcctaaagatgaatccgacaaaatgtgcttttggtgtatcggctggccagtttttgagatttcttgtgcatgaaagggggattgaggtaactcaaaggagtgttaatgcgatcaagaagattcagcctccggagaataagacagaattacaggagatgatcggcaagataaattttgttaggaggtttatttctaatttgtctggaagattagaaccttttacaccattgttgagattgaaagccgactagcagattacttggggggcagagcagcaaaaggctttggatgatattaaggagtatcttagccctcctcctgttttgattcctccacagaaaggaataccgtttaggttatatttatcggccggtgagaagtcaatcggctcagttttgattcaggagttggaaggaaaagaacgagtcgtattttatcttagtcgtcggctcttggatgctgaaactcggtactcccctgtggagaagttatgcttgtgtctgtatttttcgtgtacaaggttgaggcattatctactatataacgagtgtactgttatatgtaaagctgacgtagtcaaatacatgctatcggctccaatattgaaaggaagggttggaaagtggatattttccttaaccgagtttgatctttggtatgagtcgccgaaggcgattaagggataagctacagccgattttattgtggaacatcgtgatgattcaatcggctcggttgaaatagtaccgtggactttattctttgatggatcggtgtgtactcatggctgtggtatcggcttagtcataatctcccctaggggggcatgtttcgagtttgcttatgcttaatactattaagccgtatgcgactaataatcaagttgagtatgaggcagtgctcaaagggttgcaactattcaaggaagttgaagccgataccattgaaatcatgggggattctctgttagtaatcagtcaattggcaggagaatatgaatgcaagaatgatacattgatggtttataatgagaagtgccaagaactaatgaaagagtttcggctggttactttaaagcatgtttctcgagagcaaaatattgaagctaatgatttagctcaaggggcatcgggatataagccgatgatcaaagatgttaaagttgaaattgcagcaatgacaaccaatgattggaggtatgatgtacatcgatatttgagtaatccgtctcaatcggcttctaggaaattaagatataaggcattaaagtatactctgttggatgatgagctttattatcggatgattgatggagtattacttaagtgcttgagtgccgatcaggctaaggttgcaatcggcgaggttcatgaaagaatttgttgtactcatcaataggctcataagatgaagtggttgcttcggcgtgcagggtacttttggccgacaatgctggaagattgtttcagatattataaggggtgtcaagattgtcagaagtttggagcaattcagcgagcaccggcgtcggctatgaatcctattattaagccatggccgtttagaggatggggcattgatatgatcggtatgataaacccaccatcgagtaaaggacataagtttatattggtggcaactgattatttcactaagtgggtggagacgattcctttgaagaaagttgattctggggatgccattcaattcgttcaggcatatataatctaccgatttggtattcctcaaactattattaccgaccagggttcaatcttcgtgtctgatgagtttgttcagtttgccgatagcatgggtatcaagttgttgcattcttcaccttattatgcacaagctaacgggcaagccgaggcatctaataaaagtttgataaaattgattaagcggaaaatttctaattatccgcggaaatggcacactcggttggccaagcgttgtggtcttataggatggcttgtcatggatcgatccaagtccctccttacaaacttgtttatggacatgaggctgttttgccgtgggaggttagaatcggctctcgaagaacggaattacaaaacaatttaacggccgatgagtattacaaccttatggccgatgagagggaggatctggttcagtcacgattgcgtgcccttgcaaaggttaccaaggataaggaacgtgttgctcggcactataataagaaagtggtacctaaagatttttcggaaggagaacttgtatggaagttgattttgccggttggtactcgtgatggtaaatttggcaagtggtcgccgaattgggaaggaccgttccaaatttataaggttgtgtctaaaggagcgtatatgttgcaagggcttgatggttaagtctatgggcgagcgctcaatggcaagtatttgaagaaatattacccaagtgtttgggttaatgcatgatcggctagtattgccgatgcatgacagccgatgtgtttacatcgccttgagatggccgatatggttatatcgcccttagttgttttttcatggtgtaatcggttgtggtttgccgatgtacaatggccgatatggttatatcgcccttagttgtttttttcatggtgtaatcggttgtggtttctataattttatcaatgtttttgacattgtaaaattagggggcacatatatatcaaaatgaaattttttgagcgaatttcgaagtcatattaatcggcacaaaggattgtcaagacagtaaagtactagatcatcttagccgattacaaagatttctaagtcctattacataacagttattgagacaagtattgctggatagcagaaatagcttgggcatcttgagcgtcagttccaggaatgatcttcaaagacttagtcagatcagcaacattcttgatagccgatttaagtcttgctttttgttcttctacagaccgcggaagatcggctagtttcttgtgctccagatctaattcggcattgcattcctgaagttgtgccaggagctcaatcttgcgagcctcgagccgatcaatgttggattgatcggaccttctgaaagctgatcatgtttggatttttcctcatgcacaagttgtcgattagcttggattgtagcttcaatgtctttacgttctcgccgttcggccagtcttaacttggctttctccaatttgaattgatgttgctcaggataaacggctggagtaaggatatcggctaactcatctgggatcagagcttgaatttcatgtagctgagtcctaattgagccgcaatcaactaccaagctatctagtgatgatgcctctagccaatgagaaatattttccagagttttcttcacgtcatcggataaaggggctaaggctttgcttgtggtgtcttcttctccctcatcaagataatctttgatgtcaaaaggaaaaagatcggctaagacctgcagcgacgatttaaagagagttaggggtcaaataggcatagccgatctgaatgttttttgccaaaagaaaacctactgggatagtaggaacagttggttgaatttcttcttctatatggtgacttcctacagctgatggagtctggtcacttgttgattgctgtacagaaggagaaggaggaggaggaggcttaaaaagaaacaagtgttaggcaaaatcggctgagagttaattaatgaaaaattgagattatcttactggtggagctggtttagatgttgtcgcagccgatttctttttcacagcagtcttctttttctgcaatcattaaatctttaagtaatcggccataagataaaatgattataaaagggattaaagggagctatttactcttgaaaagtggactggagcagaaggagttggaggggtttgtttgggtgaagccgatggtgttcgttctgtatcgcttacttcggctgcggcctcgtcaatgtcatcttcaattatttattcatccagagcttgttcaatggatggatctagagcaggcagatcatcagctggtgtggtcttctttgtcttagtcttcttctttggagctggggcagaaatatttacagccgatgatctggtctttcttttcttgtcggcatcggctggttctctgataagcccttggagaagagctgaagacttgggggcattatagccgatgacggggggagatggcccacctccgttggggatcagtcctggggcatactcgatatccctgccgctattgctttggtgagggggagaagattctgttgtctgcaaatcaggaggaaagttagctaaggactaatcaaccaagtaattattcagataaaatcaagtgagttagaacttacttgagggacaatatctagaaagagatctgtcatatacatggaagccgattgatggaataagtgtagcttccattcaccccaccatctgtcaaatactttgctcctaaaggttgccagctttatggtgtcaatgctgcctagaggaggtccttggagattgagcagccgatccatcattaaagatgatgagatttctcctcggcattggatcttatcggcaaagaataagccgattgagagttggcccattccaaattgtctagcagaactcattggatgataaaactcataggaaacttgggtgtttctcccttgatgaatgccgactggaaggatgcatggggtgattgcagataagaagatttctctgggcttttgatatatgtcattgttgatgtcttcgaatctgaagtcccatggattttccagaagtgttgagtctccatagagaaaccaaactcgagcatccttttggaacccctcataaaagctacaaaaccaatctttgagtagctcggccgatagttttgctcttgcatcagttggtgtagaggcgtactctccatatgatgtgcatctccgatgagtgagttcctctccatcatcgttaacagtcggctctaatcttgggaattcagtttctgttacagatggccgattgacaaacctcatgactaccaagtttagccaggattgcagcagccaccatggtccacccgctccgactactgagccgacaattagcttagccgatgcattatttagcatttggtacaagtagccgaggaggattttgcctaaaggaaattgtctttttgtctccaaggcttcggctacgaactgccaatttatttgtaagaccgcagctagacccacaaaagagaaacttttctaaccacattaacaggaaagccacatgttctcgaggggtaactggaccctggcccatatatgctgctacatagcctgaccagccgcctatgctcttggtcttgaagtcatattgattctttgtatttaaactcatagggttggccgatgaggtgacatccagacccgtgatcatgctgatatctatgagagttggggtcatcggtccttgattaaacaaaaaggcattgatggtgtttaaccagaagtaagaagcagttgccatcaggggttcatctttggccgaatttgctatagtgaggtcaagtgcttagccgattccaatttcgtcccagtgaatccttttgcttgttgacacacgtttgaaccatgtggtccaacttttctcgggtggaactttctctagagatggccaagatttaaaggtgttcttccaatgacctagatctgggttggttaatctgaagggaatcctattggtttcaccaatgataaactcagtgggatcaggattgccgactaggccgagaaagtagtagttttcgtgtgataagcctggaatcgcgattcggttggagagatgctacaaatccaagacaaccgagagaaagagagcgatgtaagataggagaaaatcgatctgctgctaagaaaaggggatctagccggtggggacttacctcagcatactcggctgatgacgcatcagatggattggtggaagacgacatcgctgcaggcggaggtctcgccggagatgaagtcgcccgggagtcgcttttgcatcggaggaatcgccggagagagagagaggataaagtttgcttgagtggtgaaaacggaagtcacgttgtgagatttctcgagggtgacggttagtatttcaagcacggcaataacggtcggaaaacggcgaagtgcgaaatttgctcagagtcggtacacggcaaatccggaacattaccaaatatcccggacttggggggcatgtgttaacaaccgaatttggtaatatcagcatcggaggtgaggatgggatcgaagcggagtcagagataaggattgttgcgggaacagagtaagaatcggctagagtccagatcggctacgactagaatcggctaaatctaaatcagactgggtttggtgatacagtcgattccgacaatacgacttggtgtacaacatcgagttgagtcgatatgcttcaaaatgattgccacacatggatagagtcctgagaaggcaattgtatatattaattaggatgttttacgtaatttccttagagatatgcttagtgcaaaagtctgtcgcaaaaaattatgatatcttagagtttgttagagataatagtcgtgtccggtatggacatatcttataattatcgggtataaatagaccccaagccctatgtaacaaaaaagaacacacgttcaatacaatctcagcgcatcgccaccctttttttgctttagttttatttcgacgagttcttgctttcgggttgagctgcatcggtttcgatctttaacaagaggtaaaacttgttatgacggcttgcgttctcgggattagtgcttccatctttatgacactctaatcttgtttatgtaattcgtcgagttatcatatatcctacataatccctggcaatattgatatctaacctacaatcggctaaacatccgtcaatagaaggcagccgattaagttaaataccgatgttaacttagattatataggatatctaccactctatgacacatccaatggcttgattgtctagatattttccttcttttcatacttatagctgcatcagttaagtttgatcttatgagtcgtgattagaatctcaatctctagcttgcttctcggttgctgattagggtagcatcggagtttcagccgatcttacctgatttgactactttttatcctatatgcttgattgacatgttaaatctgccctttacgttaagatcttgctgcatttaagtatattaggctattgtttagtatattctacttgctttaatatcttaatataaggtggtatcggagtattagccgatacatgctagatctatctgatcggctatgctatgaacgtacatagtctcattattaatatatgtttcaatctaagtgatttatactgtctcggcatagcgaccgatctatcccaatcacttgatttaagtatatatcaatataaagattatatattggtaatatctgcagccgatcgagtagatttagtcccttcttatttattaatggctatcgatcgatgcatatatgacatcggctcaaagataaatgatatgtcatcggcacctagccgatcggctatcatttatagatttaacctcgatttctttgcttctacttcttgttggatacaggatcaaatcaactggcacgctagcacacccgaaggcgagctttggacctgcactggagttaagcagatctcccaggcctcgtgttttctgtcaacaccaaggctaccattgatacaactgttgttcacatcaagatcaaaatgcccaagtgctagaatcctattcggccacctgctatattgttgacttcgaacggccgccaaatatgcatacgggctccgttttgggtccatgagtatttgatggaaagctctcagagtcatctttccaatggatccagccttatctccaaattccatctcgtttggccgcaatcacataaacaaggagatgcgtcacctgtaataggcatataggcttgtaacttcatttgagacatcaacccaagtggagcccatgtggggtgcgtcccaaccaggtggagcatgaccctaaggacccctaggttgtcctcccacctttataaatagctaggttccccttcagggtttcttgggttttgtttagagtaaagtttagcttcgctactttgctgtgtaatcccgtgatcggttagatcgccggtttgctcgttacggaatcccaacttatcatttgtattcaattcctatctacaattcagattgcttttatcttgttcttgcttgtttcttcgatttgcttacaggaataaggttgatatgcattggcaatatcaacaacccacggagaggtgtatcgattgctaaggtgtaacacaacaacatctcgcacggttgtagttgggttgtcaatgcttctcccaaatcgtagttatcatcaactcaccgaaagatcaggccaacaacagccttcggtgtctcgagtggagctcagggtttatcaagtggtattagaacttttgttgctcagtgagttttctttctacctataaccagaaaatagccataaaaaatattgcatccatcaccttgccatctttgtgccacttctttgttcttttcagtttttaccttgttgagttttgcgttacatcgtcgtgctgagttgctggtcttagcgtttgtctgtttagagttttgagttctggtcacgttaagtactactatcgttgtcgttgccatgtctttgttgtcgttgggaactttggaaacggaattgtctcgccgtcagggtttgatttttataatttttagaagtttttgtggatcaggttgttgagttgcattagggtttatgtagacctagccgtggttctgtttttgcccgtgcattggtgtcgtgcagacaggggaagaagattatcagatctattttatttggaagtagtgaaatttggttttggaaagaaatagtagattgaatcgattagataggttgtttccttgtgttccttccgtgtgccgtgcaggccaagcgaatcaactctctccccctccaaatcactttgagtcgtgtcaaacaccttggtaaatttttatttggtgtcggtttcgaaaaatctccccgtgacttgtgcggtaaacttttataaattaatgtcaatattgtcatatattagtacaggtggatgcgatgtttttcaccggaacgaaaaatttcaaaaagcacaaaaacatgagttttagatatattggagtggattgggcgcgtcgtttttgaaaactctcccaatgactcgcgcgacgaacttttgtcaattaatgtcgtatattgacacaggtaggtgtgatgttttacaccgagtcgaaaacgttcaaaaaaaaaaaacaccgaaacatgagttttgaacataatggtgtggaataggtgcgttcgtttcgaaagatctctcgttactcatgcggcgaacttttgtcattttgctgatattagtacacgtgggtgccatattttttatcggaacgaaaaggtcaaaaagcatccaaacatgagttttggatatattggagtggattgggtgcgtcggtttcgaaaaacctccaatgcgatgcaatattaattatgagaaacacgcgaaattagcgaaagacaatcgcaaacatatgtcctaaaggctaaagcaaacaagaccacccacagtctagcatgcatggtgtgtatgccacgcgaaaacacaccaaattactgaaaaccacagcacacaggtcgaccggcacgcgagatcatcgatcacactcagaggcaatcatgcatgcatggttcttctaccggagctcacttaggccgtgtttatagtatctgaaattggggagaagtttaatgaaagttggtaatttgaaaaaaaaaagttaagagttgatgtatataggaaagttttggatttgatggaaaattgggagttggagaaaagtttattgtgaactaaacatgcctttatttagcgcccagtcttaacgctgagcagtaggctagctaggaggaaagctcgagacggacggagacgctgttgctttacatgcatcagttctccggtgaagtaggcgcggtggtcaccgccgcctcctgcttgtttccaccggaaccttcagcttcgttcgcattatctgctgctgctgatgccgctctcgctgccgctgctgccaacactgcggccactgccacctccgccgccgcggccaacgacattccaggcgtgccaactgcaggggaatttgtgccctgtgaaaaaaaaaaagggcatgaaaatcaacaaattgaacacagtaattaaaggggatggaatgtttggattgcgtggcagcgcgaattatacctcgcttccgttggcacgctgccgcgtcttggtgactgccacgaggtactctacctgcatctgcttgcagtggccgatcgaataagagtcagatcgactgattctgttgagttatttaattggtactcgctctatttaattgttaacttttagattatgtttgatcattgattttatttaaaatgttatataagtaaaatttttatttattttattattaaatatactttaaatgagatttatttttttttatttatataaaagttttgtacgaggcaaatgatcaaatatatatttgtataaaatttaacttctactccctccgtccaataatataaagggattttggagggaagtgacacttgctaggactacgaatctagcttagcccatctagattcgtagtcctagaaaatgtcacatcccttcaaaatcctttaagtcaacagcaatgtattttgcctatctagataataattagtaaggctaagctaagaaggcctttgtaaagtgggtcccatgagaaaaaaatattgctttttgtctaactcagcatgcagtagtagtacattcttgtgttggaaggagagtgagagagattttaatgttttttttattcttataactagtcataagcttactacctatcattgttattacccacttctacaatgcttattactacgtcataggaatactatattgcctaatacctgctttttcctaacattgtggatgcccttatattatgggatggagggagtataagttacaacgaagaaacaaattagactgcgaatatatacattagctatagtttgattttttttcgttgcaatctgtaggagttaaattttaacttacatgtttatatggagcgatttatcatatatattaatctatcttattttttttttaaaaaagatcacaatcatttgagtttagaattcactccataaacagaaatttgcacacataaatatgccgtcgtaccctaagattgtgcatctgtgtggcattaagtttgatctgctccaggatggggcgggggcggcctccgatcaacgaccgggggacgccgtcgtcgccgtcggacgggccgtcgccctgctgcctaccaccaccggagaacgccatatatctcacgatcagttcagctcgactccaaaattcacctacaccgcgctctagtttgataggcttgtggaatgtggagtgtggactacttgtcgtggtgttggtgctggactgagtgtggtgcggtggggaccccggcccttttgtaagcgcgagagagcaggagcaaaaacgtaccaatccacccacgcacgcagcatcagcatcagcctgcagccaagctgtaaaatcggcgtaacgcacgcacgtacagctgcgtgacgtgcgacacatacgtacgccaccaactgcggttgctcgtgtggagattgttagggagtgcgtatacgtggagggtgaacggtgtggtctcctgtggtatatatactacgcgtactaatggtagaggagtgtggtgcgcgtgtgcgtaggagcggcgccggatgcaatgcacgctgcagcatgcagggatatgtattgcaggcatccggccataacggcaggttaacctttcggctggcgtacgtacgtgacactagctatatcgcgtgcttacttttggtttccgttcctaccagcgtgcggtttttctcaatcctgaacccggacggccggccaatctccctttctagctccccccccccccccccccccccctaaaagctagcggtgatgtatgattcatgtgcatttgttctatagagggaagtggataatcactggcgttggggaaaacgatgcagtgcatgaaaaatatgagaatgtaatgttaactaccgtgatttgttttagaaaaacattgggcatagtgaataagatgactcttgcacgatagataatttgcaggatgcatggcatatattgttgtggccattttataagacatagcaatcggcattacatgctttattattttccacaaagaatcatatacattacaggtcatattttgttgtttacgccaaagtttgtagaaaggcctataatatcgtttccttatgtagaaaccatgcattgattttcttacgcgataacgtcttttactccgatatgtgttgtattagttttttttgtcagctcctttaggaggaaaccgttgattaattttttgcataggaaagagtacgtgttagcagttattgtcgtgttgcaatccttatggcgataagaattgttcgttcaagagtaaactccacaaactattcatgctttgtcgctttccttcaaaaagaacaaggtatcggattttactttttcgtcttcgtgaaagagggcgcttccgtacattcatacttaatttgtcgatttcctcaagagggtatttatggtcgaagattatttgaccattgttactttgtatcttccttatcacggtttattgacatttattaattttatatatacctcagtggttttttcaaacaaataatatcttctcgttgcagtttatggacacattactaattgttttcatattttctttgtctcctttcttttactcggttctacattcattatttggtgtcgattattcattgggttgtgcatatatattcttcggctatcaccctctttctaattgttgccataccctctttggttgccgtcatgattggtggctgatattggagagcatctctcatgtataatgctgatgtggcaaaatttctcatgcatgtggcaaccttttggaccataaatacacccacatagtcaaattactgtatctcttttagattacttagttagtagcaaatcaaaatgtattaaaattaatgtggcaagaatgaaccaaatcgggatagcacataataataagaaaatgacactatagattaaagctagcaacagttggatatgcgaagtgaccgccttcgctcaatttgggtcagactttgatgctgcgactcagacattactcaatagaggtgcaaggcttacagaagtgcccaaacaactacaatatgaaccacttccaattgaaaaacaaattgttgtgatttatgctgttgtcaacggcttctgtgatcgaatgccactagacagaatttcaaccacacgttgcaggatatagaagatataaagagtaaagtccatcatcggtctctaaacttgtaccgctgtgtcatcccggtccttaaactcgcaaattgaccgttcaggtcctcaaacttgttcgactgtgtcatcccggtccctaaacttgcagatcactcgtttaggtcctccaacttgttcagttgtgttaccccggcccctaagcttggatttgaatatcatctgggtcaaataggacggtctaaagactttatatttaaaaataattcataactttttcatgtgaactctaatgaagacaaactttatatcaaacttgtagccctcgacgcgacctacaactttgtagttgatttttttattttaagtcattttttttgtctcaaaatgtaattttaaaattaaaatttcaaaatctataaacatgcaacaatattttgggaccctaaacagttctaattcaaaaacttttcaactacaaagttgtaggtcgtgtcgagggctataattttgatataaagtttgtctttattagagttcacatgaaaaaaatatgaattattttttgatataaagtttttagggaccggggtgacacaactgaacaaattggaggacctaaacgagtgatctgcaagtttaggaatcgagatgacacagtcaaacaagtttgagaacctgaacggtcgatttgcgagtttagggaccggtatgacacagcagtacaagtttagggaccggtgatagactttactcagatataaacaaagcttgcatttactcaaggaggtagtactagttgcaatctctctctaatttgtgtctatcaagtccagatatacatgcatgaatgcacatccaattaatttataactttttttcagttttccataatggttgatgcaataaaatcaaattttaatttatagtacatagagtaaaataacatcaagctagcatattctgcagattttagctcagaccaatgagaacaagctagaaaaataaatgatgaatttgagtgaattaatttattgctatgacgtgccgtcgaacgctttttcctccttgcgactttgctatacgtcgacatattttggtttctcggctgagggtgtaatattactccttgactttggtcaacagttcaaggttaggcctctcatcttcgtgagtaatcacgtgtattgtatatagatgggtagtacatgatgtacatcttgatccaatatggctggtaaaaatatattaacaattttcatgagacaaacctgaactacaaagagatgatattgcagtacgaacgatatatacaaattaattaacgttcctgcaggctacacatgcgaagatatacacaaagaaagaacttcgggcttcgatggcgcgatgagcccgatcgatgaggaattgaggcctaacctcaagcgatcgagcttccgaggatcttcaggtcgatgcgcctagaatcaccacctgcaaaacttcacaacagccgatcattgtctgatttggcgcaacccaatgcttgtgttgcaacctagctagctcctcgctctgcacgttgcaccacctgtttccaacagttaaaacaaaaataacaacagagaaacgcatgcatggcgagatgaaacatttcaagaaacaagtgagcggaaacaaacaagatcacacacgcgaacacaccaaattattaaaaaccacaacacactgcaggcgagcatatctatcgatcacacattcacacagagtacatacaggtaaatcaaccggcatatgagttgtccaccatgccacacaccacacacaaacgcatggtttctgccgggtctcacttatttaattatcacgcagtcttcacgctgaaaatagcaaaactacagctaatagtagtagatagtaacgctcagaggccgcccggctggaggcgcccctgattttattcgttcgctcgctgggtcggtcgcctgcacgcacgccggccggtcgccggaggaatcgatggagctcgacgccggccggccgcgcgcgccatgtatccatctcgcgggcatcacttcttcggcgcggctggtggtggggtggtgccggtggtcttcgcggccagctcgttctcagcggaaatgtcagtctgcttggcccttttggcagcccgagttgcccctgccgcctcgtactcgtttgaagggacgaacactcctctcgggtactgtactgcgccctgcatgtgggaaattttttttgcatgcatgccaatcagaaaaacatatagtatatcagatagaaatgattgttcatgaataacccagtcgatgtatattatatatataggaattaatgtttgtttaccaaaaataaatcaaagctaattaacttgacggatagtacatcattttcatggcgaggagcagtagtatatataccggatagaatccgttgacaggtggcacaccaagcgacgagagatacattgactgcatgcagatgaccgaaataagagtcagatcgattgatggactaattcatcgactttttcacgacccaaaacaaaataaatggatacatatatacaaaattatttttttttcatttaacaaggagtatgatgaaataactaaatgagaaatattctatcataaaaacactgataagcatatactatactgagtagaaattaatcaacatcatcacgcacgtactacgggactaatgaactatagctatacatatagctagaacgatcagttaactaaagttgcggtatatataccctaatcatgtccagctgcgccgcggtaagggtgggcggctccacgacacggccctcgatggtgaacaccggccggttggttgggacgccgctgccgttgggcggcccctgcccaccaccaccaccacccaacgacgccatcgatcgatcccaaactacgagaaaaaaccggaggatttcgcctacacaaccgcacgcacacgaaaaatcaaccaagctcgctaggcttgtggtggtgtagctgtagcgaggagacggggtggggggccccttttgtaagcggcccgagcagcaggagacgtgaccacagagaggagggaggccccgtgctagctcacgcgccccggcacccccgtagcgtgacgtgcactgctaaccccgccccgcgcccgctagtgttagcagctaggatcgatctgcagatacgacgccaagtgcgtacgtggaaggcgaactagggaggggtagtgtgtggggtccagcgtagtggacggtgcatggtactacgcgcgtgtgtgcagtgccgggccgggatggacgatggatgagcgatcgatcgatgatgcagcaaaagagtacacagccacaacggttgcctagctctccatccatcggctggtgtgtatgtgtcagtgtgtgtgacattctctcctacctggatggctaaggataccaggcatagtgcgttggcatggcatgcttttattttgttcgatctctcttctctcgatgctgaaccccagcggcaacttctgttaaagctatagctgatcactgccgtgcggttcgtttggatttctgttttggagagaagtgggggaccaccgagaagatgtagtgcacgaaatgtgagagcaaattataatgcttccgtggattttttttttcaactgagaatatactacctgcggtgaatatataagattactctcacactatatatataaatcgcatggtttatgatgtggcgctcaagaagatatggtaaacaccgttacatgccttgttattttcctttgaagaatcatatccattttagatcgtatttttgtcgtttgtcccagaaagatatatgttgtcgtttgcgtcgaagtttgcataaatatctatattgtcgtttctttacaaaggaaaccgtgtattggttcgtatagtcgtatcccctacaagagattttgtaaccatttataatacgacacaacattagattgcacattaattatcagcttctttaagagggaaccgttggtcgattttccacgcaaaaaaaacatacattagctattgttatctcactatcctagtggcaacagaagcatctgatttgttgaagagaaaaaaaccacaaatgatacatacgtggttgtttttctttgaaggatagcatatagctaggattatgcttattttgtcgattttgtttagtgatattattcgccaaagatttttaacaactgtcctttttttgtcattttattatcacggttgaatagcgttagtttatgtacatttataattttcaactagaaattaatgaatatatgttttcctcatggatgaattagttgcttttttattgttttacttgcaatgatatacaaaattaattccacattcttcttgttgatgcatcgaacatggtttatggtgtcatatatatagagtagggaaattttttgatggctgaaattttttgatataaatttgttactgatactaaggtaccgagagagatcacgatataatacctgctacctcctcgagggccttaaaatcactcatcacacaaatgcatcatgagtactttaattagtctggtaggcctccatcatgctgccaaggtagaatatcaagtatgaagtgcagctccaagctcaaccccacctgttggggttatggacttgtcaccacggaccgagccagaaaccccggtagtttgttaggccagctaacgttgcccatagctgcaagtctgcgtcgtaagggcatccacaatgtagcaaaatagcaggtagtaagcattaaatattaccttattacatggtaataaacactgtggaggtggtgaagaactaataccggatcgtagcgctactaccaggtataagcaaataaacaatgtttccttctgacacatcaagccaatgtctgcagaaagcttgcaaatttttctaaagcgggccccaccttacttccccatcccctacataaacattgtggatgttgtgaataactactactaccctgttactatggcccacgctattgctgacttcggtaagatacattgaagatgccctaagtacacttggattcagagcatcactaagagtatctcaaaatttcattcccaaaattattcttatgtgaatcctaaataaaatttgaggtgctaaaatatagatccctccaaaagattgcctaaaattgacttgctaaaactaaaaggtgggccctctacaaaatcaccaactgaaatttgtttccgcctatccctctgcgagatcacgctcgcagactcctgattgtggcctcgacaatacagcacatcagcagcagcaccagctgtagaatttagaaaaaacagtagagaacagtagcacgagaaccagcaagcagtaacagataccttaatcttcagcagtttttcataaaagtgcaacaaaggtaatctgtaaaaaaaaaaaatcacaagtgactgacaaacacatacagcacaatttggtgtcaaccaaccaccaccgattgaaactccttttagtaaaaaaaaaaacatggcacgagtttgagcaatggtgcaagagcaaagattgggattcagtttgcatcgctgaatgaatcgccaacaattgcaagagcaaagtttgttgttattagcacttcagcaaacctgcgcaagtcccaagataaacatccacacaacacacatattccaaagagtgagctaataaggctctcatttgcacctcactagctaatttccggcagaaaccttacgagccatggtggtgccggcagtcgttgccgctggtcgtgctttggaggtcgtcacagccgccgcaggcgtggtgacagccatggcgacgacggtggcggcgaagccgggatcgcagcactcgggcttgccgtcgcagcagtcgatgcggcagcagggagtcggcaggacttggccttccgtcacggcggtgagcaccaggagcagcaccaacgtgagggcaccagcgatcttggaagtcatcggcgccatgacttttctgcttgctttgcttttgtaggtgttgatgaactgtcgatcgatcacgctcatggtatacaactttatataggcccccgtacgttttcatatcaaagcagagatttcaaatatgtcaactaaccaaaatcggaggttactcatttgtcaatgaaacagaacgtattaaagtgtgctaagaatgaagtaaaccaggatggcacataattaaaaagggtaaattttgcagcaggatagatcaagcattttatcagggagttaatagttgtgatatatccccaattgtttgggcagagaatttgcatttaaaccgccctaattctcttttcttgtattattctagctgtttgttgtacttttctttaccatctgtaactctgttgtaagactctactctttccttctaatatagccggcaattctcttgccgtcttcctttcaaaaaaaaatatccccaattgttgccccttccaagtccatatgtgtattacgcatgcatgaataacaaaatctatactaccttcttcaagccaattttcagaaagtgctttttttaaaaaaaaacacggtataaacataaacgttccctataaatgcatatacacatacccctacaagagcctttgaaaaactgggcaagtatatcttgaaattaacgaagtttatcatagtcatcttgttatcaatgaattctttaaattgcgtgtatatcactaaaataataattagctatatacacgagcatccatattgtgttgaaccagggcaggtcctaccataatgaacctgataaaagctctagcaaaacgaatgttgactgttctagctaaaggaagacttaatatgtatccaagtagccgatctcttccgtctagcatccatttaaaatcatttgaaatatgaatttagagcttcccaaaatttatactaaaaaatggtatctccaggtccctcaaaggacagtaaaatttacagtgaatcaatatatgaagcatgcaaagccttgcaagatagacgggtgccatcacgtgatcaatgtcagaaggggcttctacttttgatttcgacctgcccgttgttctgaatgtagtaaggctaaaaattaaacgtgtggttttagaagttcgtcagttgcacagataaagattcacatgtgagcctgatgggcctgaattaccaatgcactgccgaccattagttggcatatccatgtgtagatgcagatggctagcatggccaaacactcaaattccaacatggataaaacttacctaaattcactaaagatcataactgtttgtttcagttgaaagttgaaactacttattgctctgctatatagtatatcctattagtagaggaaattattataagatgtcaataataatatccaaatcagtggaccagacaaagtaacaaactgtcatgcaaatgtcttcttttttttttctcgttgttcagaagctgctaccactctaaagcagagagaacaattcttcatcttaaaatatttgggtttcctgagatctgccaataaacaaggcagccaggaaaattcctgtttgtcctctacggcttaacactctcacatggacatgaacgagtagggaaaaaaaaaactaaggacaacacagcgaacgaatcaacattgagtttgtagcgaaaattttcagagtctcatgcactcccaattcatggcacatcgatcggcgataggccggccgggtggtgcctttgatggagtttcgcactagtgaccgccggcgacgacggcggcgttggacacaccccttgtctttggtagccagatgagcgcaaggactccacagatgaaggcgaaggcgccgccgatgccgaacgccggcgtgttccccttgttgaaggcgccgtcgatcgggccggcggtgagcgcgatcaccagctgatgacaagagcaacaacgaaatgagaattagtgcctgaaagaaaaaaaagtcatatttgaaaaacaaatttctagatgatgacacagctcttaatcttacctgtgggacaacaatggcaatgttgaggacaccaatggcaagacctgagcaatcaatccaagaaaccaggattttatcactccagcaaatatggaggcaaaagtgtaaaaaatttcaaaggaattagatgaagagatataccttggccgccaccctcctcagcagtaacctcagaagcgacggcccatggaacactgaacaacacctgcaaagatcattgcagcaaacagtaataagcaatgcaagcaaccacaaggagcaactaaaattcagagaaagaaatggacatgaaaaacacaacacatacggcctgggggatgccgatgagcgcgaagacgacgagcgcgacggccttgagcgtcgggtccggcccggtgagtccggcggcgagcgacggccggtaccctctcatggacaccatgccgacggcgaccatcaccgccatgagcgcgaacacgaggaagttgctgatggaccagaccaccttggacgtcagcctgcggcagagcttggggatcacgaaggaggtgacgccgagcgcgacggagcagaagagcaggcccatggcgccctccctgacgccggcgtcgtacacgtcggccttggccgccgtgccctgcggctcgccgtggtagatctcccgtcccatccagtcggtgttgtactggatgaaggggaaccacgacagctgcaaaaaaaaaaaaaaaaaaaaagagaaaattttacgtgcagatcagcgactttttcgtatgatcgaatcggtgagcgagtgcatcggtaaccaaacgcggaagaacgacgtatataggagagatctaaattaacttgatgacgacacggaggcacgatatttgtgcaacggtacggtacgtacccaggtgacggccgtgacggcgagcactttgaacatggcggggggcaggttcctgaggctcttgaagaggtcgacgaacacggcgcacccgccgccgccggaggtgtcgacgtcctgcttgtccagcggcatctcgtcggcgaggtacatcgtcaccgtcatgctgacgacgatgagtagctagtgattaagcaaaagaaagcaacgttaagcatcattaaaccaaccatagaacaattcagtatcacaaaatatatcgtatacttccccatcccacaaaaaataaatcggactacgaaactgtcacattcagtagttggtttttatgggatggagggagtacggagtagtagtttagtgctcaccacggcggtgaagaaggcgcccttgaggttcgcgcaggcgtcgcagcacgccgcggttttcagccatgggaaccatctgacgaatggcgcgatcgaacgaacaccatagttagccaacacggcacaaatgcttgagaagtaaagaggacaaaaaatgaaagatgatttttgtagatgactcactcgtgccatttcccgttggcgccggacaagtagccgaggacgctgccgatagccatccacagggagaagatcgactggccgacgttggggccatggtgtccagctgcaaattaagcaatcatacaatcgatcaatggatcaaattagttgtaccattacaagtttgatgaatatcgcaagaccgtaacatggtacatggatggataaatagctcacctgacagatcagccatcatggcacgagccggcccctgagaatcagcaaaattatgatcagaattcagaagttcgtgcgcattcgtgtttgcttaaaatttcagaaacattgatcaatctgagtgcgtgatggatgatagatattgtatgctactacctggacagtgttgttagcgaagtcaaggaaccagaagccaacaatgtacaccatggcggccgaccagcgaggacccgtgtacgtgctgtgtgcaacaaaacatggaacatttcgtatcacaaataaacatgctcaaatacaaacatcgctacacaagggagataagatcagacctgcagtgctctttggtgtcaccgaggtgacgtccaatgtccgccgagaaaccgatgatcatgacctgatcaatcaacaaagagaaaaaaaaaaccatgatgaaacatgatatctttgtctgatataatcatataggtaagatctagatggaagagaaaaacaatagcatgaagtgagttcgttgtgtttggtatgagcttacggagatgcagatgatgaggcagccaacaaggatgaaaggcctcctgcggcccatcttcatggtgcatctgtcactgtagtaaccgacgatgggttgcacctgacggtagaaataaatgagcacatttatctcatatactacttacctatttttcatcaaattttgcatttattttatgacttggagtggaaaaaaatacgcagtgaatcccatgcatttattgtagatttggatattgaagaaataacatatatactcgatatgaaacggttcttcgtttgacccttttatgacaattcccttaaaaacaggatttgtttttcttttgttttgtttttgcatgatgaactcgtgtggaaatcacgcaccacaaatccagcgattggtccgcagatccatgtcagggaaacgtacgagtgggaaatcccgagagtctgcagtcaaacaaagattaataataagcaaaaacaagataggaacacagcaccaagaaattattaaccgccaagaacacgagctaaatgttacaaaacatggacgctccaatggagagcaaagccaaggtaaacgaagaggaagagagagaggcatgtgggagagtagctaacctgagagtagggcgagaggagggacagctgcagcgcccagccgtactggatgccgccggccaccatgcaggcgaagaacagccgcacgatcctccggaagccactcgtcccggcgtcgccgccgacgctcccgttggcctgcagccgccgcttctcctccagcgtcgtcttcgtcgtcgacagggcggtccacccggccgcgctcttcccctcgcggtcgccacggcggccttcctccattgccgtcgtacgcgtcgcggcctcgaggagggagagagagagcgagagaaggaagaggaagaagacgagcacgcgcgcggatttgcagaggaggaggagatgaagattttggagagggaaagttgtggggttttaaagagggcgaggaggggtgatggtggtggttcagaggttgaaggcgtgtggctggcccaccggcagaggcacagggatgttttttttaatccttttttgtttttaatctgttcgtatgacagcgggagatgttttttttaatccttttttgtttttaatctgttcgtatgacagcgggagatgttttttttttgtttttaatctgttcgtaagacagcgggagatggttttttttttttaatcaattcgtatgacagtgggagatggttttatcggtttggggaattgtggcttgaagtttggcttgatcctatccctttattttgctgccaggtaagcatggggtgaatttttggatggggttgaatgtggcatttactactcggctattagatgtactggtattaattggtggtgtacatatatatatatatatatatatatatatatatatatatatatatatatatatacggatttgttcatatcaagtagtattgattatatgatatctgtacggatgtattcatgttggtatagacgtatttacacgagtgaggtttttcacatacgtattcatatcaactagcaagcgagatttgcgcatattacggtgaagatgtaaaactggatatttctccactttttttttgttgtatttgctattgagtggcaggtttaccatctatatttctcattataggagtacctttttaagctcacattctaattttgtgcttcatgctttccaaaattagtttgacaatatctttttatctaaaaaaaattacttacattgtagtattagttaactttagaaaccacaaatatcgtgccaaaactatcggttggaggcttggagctaaagagtaggttagcacacaatagcatttattactggaacgttaggccttcatcaccatccaggctctccagcggatcatcctcgtcctattttctacgtatggtagtagtaccaaattacatgcccccattaacgtctctccagtgtaaaaataaataaaaaaataggcacgttaccttccctgtatggcattggcaaaagcgggatgagtgatctgtatgagagtgacacaagagtgatgagttaaagctatgctacagtgccggaagataagcgatcgggacctccacctttggatggaacattcaccaaccctactacgatcggcgactgaaaatcccaactctgaaccctacaaaggttcatcagttcacatgcaggaagtcaatcacaagtcaggttttaccaaactgtttggggtggttaccaccgtgtggtttgacggttaccacgaaaaccacgcggttatcgcgagatatatcatggtttcaaaaattgagaaaattacagtatgtaataaccgagataaccatgagatacccgcacggtttcgtaaacaatgatcacaagccaggtttttcactctttctagggggagaaataacagcccatcagactggcaacaatgccagcgcgaccacacacacacaaaaaaaaaaaaaaaagacagagagcacaaaggaacgaacaccctacagcaccagaggcagcgcaatgaaccacacatcagcaggttaaaatgtcttccatggttatacgcagattatgatatagaggtgtctcctttgagtcgaaaatacgacggactccataaggcattaaacagttcctaagggttccagctaagtcatcaaaaagaaaaaagaaagaagcaaccgagggtcacgcaacttcgcccttcagagtgacagcatccacaaaatgcagacgatcggcaccatcgcaatctgacatcctagactcagttctcctcctcctcatcctcttcaccctcatcagcatcagacccctgcaaacaaccaggtaaaaaggtagaaataagtcaacatcgaaggtgaagcagataaaaagaacaaaaaaaaaaagcacttgcattcctgctttcaattcaaagtacaaaatggtcttgcatgtgactagttaattgctactctagtagccagtatttagatttttgcatggaaatgtagtgctacaacatgtgtacccaaattaagccaagcatatgattctctctttcctagaatcataagaacaccatcatgttgcattaagaaattattacctcttcgtcgtcatcctctcctaactcttcagcctcctgcaatgacagatctataaggtccaaagccccaaacacaggatatgaaataaaatgattcataaaaaatagtcaccaacattattgaaatacttcaatggattgggccacaggtcttccttgatgatctcagccacctgcaagattaaaagctaagaaaacatgctcgaggaataaaagaacatcaagaaagctttttcttaacagaaggacaggttagacacaaattggttacctcatcttgcacaccatcagcaagactcttgtgctctgtatcagtaaaccaggtgaagaaactgcaagaaaggcagaacagaagattttcacatattttttctgatttacgattttgtatatataaaaaaatacatcaagcatgcaacaaggagtccaacagaaaacgttgttttggcagggcaccacccatgaccacaggacaagatttaaaattaatgccaaaaaagtcatatattacataggaaaaataagaatatcagaaagtacttgtcgagaacatagtctctgcaatccatcattaacaaagctgaatgaataataatgtgataacttgaaaggtatcattgcccacaatgaagtttgctcgtactaggaataagcaatgtttcaagtgaattgttatcaacctagataatagggtgaaaacacagccaggaagatggtcaggcgggcagctagattgatctttcttaacaataatggtaacaatggcctccatatatagaagcggtagatcccaaaggataaaaactaataattaaaggaaatccaaagaacagcaattaacttaagaggaaatatgtaaagagaaactaaattctgatccctatagcaatagtgatgctgtgacaagtaatctacacgacattattttggatcataacagaatcgcagaaacagggcactaagtgtgaatcaacaagaaaaattgtactaactaaaagataaatataagcatgcagtaataaacagtttgaagaacagaatacaaaatccagaagtgcagagtcttctaatagttatcatgccaacccaattttgtaaccatgtataattgaagcatcaacacccgcttaagtgatatgacacctatggaaaggttggtgcaaatcttgagcaaatgcgaaagagttcagtagcagagaacgctgctcaaagagtccctttatcttttcacaaattactagaggatgcacacaatataactgtgtgtttaattgtttatatagtaatagctatatggaagtaaaagcactaatcgtttacagttattttaaccctgaaacaaccacccaacagaataatggcagagctactaactacaaaataggaaacaagcatcaaatacttcaacatcagcatgtagttggaaataagtaaagtgaagacaagaaattgttttgaattactggaggaacaattagacatgatactgctggaggcaagagatgggcagaagaaactcacctttcctcaaccaatggtcgcttgctccctttcttcttggcattcccatttgcaatttcctgtatattattattaaagatattagatttgccatttctatacaagcacttagaagcagcttttaaaagagcacaataccattccttctttccacttaatgctagtagcatttattgtggttgttccgtcatcagcgaaggcatatgtcttcgtgagctctttgtcttcaaagtacgggttctcggagaaggtctgccagttcatattacgttcataagcacaactaaaacatgaaacataaaactatacatgtgtgcaatgatacttacaagagttatggagtagcctgacttgacatctttagaatcatccacgtcgacagactccaggtacttgaacatctgcgattaaggcaaaagaaaaacttataagttaaatgcatctaaaaaatgtgcaagtattgtccaattgcattctgtggtcatacaaacgtacaagtatactaaagttaattttattaacaacaaagaacaaaggtaccttttgatcctcttcggtcaaaagctcactaagtagaggatgactcagaaactgtaatcagcacataacaaaaataggtaagattataagaatgttaggtttcaaaaaaacaggggggcccgttattatggaatgaggtgttcacaaaccgctgtcagccagaagtcggggattgtttggataacgtcactccttcggagatagacaggtctgcgaatctcactgtatttctgctcgacctccaaaaccttgtcactagcttcctcattgacctgtaaacaatacataaaactaacataagcataccgcgctatcttctcttcctatattctagacagccaacacgccacaagaatgaatggacagtcactaaacttagacaacaatacaaaggagaaaaggatacggcaaatagacacaaatacacggaagctccatattaggtggcggtaaccaaaaaaaaaaaaaggtcagtttgggacattatacagtgctaactataaaacccctcaggattcaaaataattctgattcaatggtgaagctgtagtgagctacatgactacaaacttgatactattgagctgtccaacaattcagattgtgaactaatcaacaagctcggtgctatccgagggtatggcaatcgacaagtaggacaaggaaccaaaagttgggtttttatgatgtcaaacaagacgggcgctattcgacaaaaaaaaatatatatgcatattgtctcttaggagcatgttaccaacatataaaacactatcttatccggtatgagaccatctaaaaatatttgctcccatgtattgatgatagcaccacactatcttattcggtatgagaccatctagaaatatttgctcccatgtattgatgataacaccttctacaagtatactacagcacagtgtacttaccaatgcaaagttctcatgatactctacattacttagtaaaattgattgcgtgcagagctttcatgcatatctctaaaataacactattaacacacaatcgtgttctaatgctaccacttaaatttcgaccccaatccctgtaacttcctagcagaattcgcctttcgccaaacacccaaacctttttctgtcagccctaataccccaatgttccgcaccctccgcaacacggtcggtagcgagagcgaagaattccacccaaccacaatcacagacccccaaaggctaaattccacccgaattcgacacggccccaggttcccaaccccccccccccccctcgcatcccgcccgcagcctaatccacaggacacatccatgtcacccaaaaaaaaaaaaagattagctcctaaacgcgaaggagggggcggtggctcaccttctcgagctcgtcctggatctcctggagcttctcgatggagaggacgagggcgccgtcgatctgctcgttctcctcggcggcgccgccgtcggcgtcggtcttggccttcttccccttgtccgccggcgccgtcatcgcaaggaagcagagagccctcgctcgctcgcgcgctcgctagggttttagccttccttcctttcttccacactgcgaggcgaggcggaggaggaggggagggagaggcgtgcgcgcgtcggaggcggagctggaggagagcggagaggggggggagaagcggggggcttatatagcgggcggcgctgagattcgcgccggcgcagggtttgagccgatttggaggtggggtgggccgtcggatgatccccccgtgggcctgtccacgcgcggggggtttttctaaaaccctaaccctaacaatcggccggccgtcccaacgctgctgccgctcgttgtgtgttgtgttgtgtgtactagatttgggccggatgattcagatattgcaaattacaattagcctcggatgtccccaaaaagattgagccaaagttaaatttaaaattttaattttaaagttgatttgaaaatatttttaacgtatttttttcagcattgacttttaagtcactggaaacacataaattttagttttacacacaaattatatttttttctaataagctgctacggcttataataagtttttgggcaaccggtgaggccctatattgttttcactattatcatttcgttgtattaaggcaggcaaaaaaattgctatattgatatcatgttgttttatttaaactgtgtggagtacataagtactttttttaatagttgaaaggataaaagatttcgatgttgttatgtgtgtagtttaagggagtgtgtcccaacttccaagtatatattgaaccctacaagcttgctaagaatctcacatgccacattagccaaattgcacaagatagccttttctcttactttaaaaatgacacgcatgtcctacctcacatggacggatggatcagttgatctcacatgtggggcttaatctggacgtcgaatgtccgcttggcccaacgcttaagcggatgccagattggcgggatgacagtgagtggactaaattcctcaactcctcaagtgcaccaacggagagaaaactctagtcctttattatggtaaaaggcgttgtcgacgaagtagatcatggctacaatatttgtagagtatataaggattgttggtgccagggtctacgcgagattgaggtaatcgatacggagacaaagatttttatgctggttcaggccctttatttgtaatagccctgctcctattagccgaagccggtgttgttcttattcatcagaatcacacaaatacaatatttaggataatctgtctagttatcatcgacttggaggcatggaacaccccacatagtcaacgacagggtagtcttcttcctcgaatatgaacgcggcgagatcagatatggcgatagatccatcttgttgatctctgtggcttcagattgggtatgcttatgcttatctcttatcttcaagttaaaagtatgaacggatcaaatgtgcatcataatatattaaaaacaagcttttttgttttcaaaagcttcttttcacatatgtatatatatgaatcgggctaggattttttttcccaggaccatccctagatttgcctatgttttgtaggcttgggtcagttgaactcatatgtatttcagctagatttttaacttggactctttgtaggttgctgaatacctctaacgtgtcgagcttgggcggccacacaaggttgccgagcgctgactttgctgataacttggactcttgggtccagggatggcaatttcccccgtagggtcggggtcgggtgtagtttccaccctggcgggagtgagggccagggccgcaattgggccagaggaggtatattagacttctaaatatagtgccaactctaaatatagcccattaagcccaactcaacttggtgaaaaccctaaccctaatacaccccacccccactcccccaagttcagactcaccctcctcactccttagccaccgtggccagcacgccagtgcgcctctccatctcgcgctctaccctccgtccctccggccctccaatctccctctcgcctctctcccaatccctcctgtcttcacacggtggcggacgggcagcatggcaagcagcgcacgagcggcggaccgtcagcgcgacgggcagcgtgcgggcgcggcgagccggcgaccgggtggcgcacgcaagcctcctgccacgcgcccctctcccttctttctccacgcggcggtgagcagggcagcggagcgcaagcgcggtgagccggcgagctagcggcgccgcgagactctgcctttgccgcctccgacagcggggccccgaaggggccaggggtgggggttgatttggccccgcaactacacccggggccggggctgggtggagaagtcgagggttgggggcagggccgttccagcccaacccgccccagacccgccccattgccatccctacttgggtcagtttacgaatttcaaatggtacttgtacttctaatgctgtttatcccgattagtgaaaacttctgatgtaacatttgcataacaaagagtatggaaatataggatttttattctcaacctatataacgtcttgcatcttagccatgcacgtaatgtacgtggttgtatacgtatttgctctgcccccttagtttgcaattaattgagattgccaactactttttgtttttcaatccaccagtctcacaagatattgccagttatttttaatgatgttactattctattgacaggttgaccatgctattaactaaacatgccatctaccactgatcacctgggagcatatcactctagtagttcaacaaagtacgtttttaaatgttaaacattaacccaatctgtatagcttgcaaatgtctacatctcacattgcaatattataataatattttttatccgaaatattgtaatgttacttttaagataaatctatgaacatgtatatatgagatttccgtgaagtaaatcgaaatagttttgaataaacactactgttctttaatattagtattttctaactataatgttacaacgactaattttgataggaatttctgttgaatttgcaccaatgatattaggtaggcattttaaggaattacgaaattgtagaaggatgccatgtgaagataaatgttcattttataagattatataaaaaaacagtgctatattctactgatccatggttgatatatattctttgggcatattgttgatccttataacattttgtggttgtgtgaaatcgttgtcatgattaatattttgtgatgatcaattggttgtgtgaatgatttaatcaatgaattgattcaagaatatatgtagattttggtgtgagtgtgtgtgattaatatgggtcaggttgtgatatctatgtttagaaatggttgttttgtctgattgtgatatcgaggttcgcgaaggaaacttgtagaaaaattagagagtatatggttgctacagtactcgatacatgcatgtgtgtgcgcgttctgtgcaacacagtatgtagcggctcggttggattggatatttggatggagaccgagtcggccgaggtggtggctgagccatgcggcaaggaagcaaggcaagcagcagcgagaccgagtccgaatcggttgtgtggctgctgtgtttcgagagagaaaggaatggttttcttatgtcctatacgaaattcacaatattccttccaaacatgacctgaactcgtctctatcagaatggttttctctatccttaagacgactgcgtttgctctctcgattgcattggttaagtttgatggattagtgatagcaatgtgaattaagtaattaattagtgaacaattaatccacactatgatatgtttattgatcggtgttatgtgataaaagtagtaccctcacaattttcgtatgtcctatacgaaaatccacctcacaattttcgtatgagatgacagaactatcggtaaacggtaaagtgcagtaacttttttagataatggaaatggattatctccagtctatctatggacacagtcaaaaagtcttagaagttagaagtgaacatagaaaaacttaaaaaaaaaaaggcataatgggacaaacccccaacttctatcaataagatgatctactaaaataatatttccaaaatcacataaattctatcacaaaattctataggtaccatgtcatccaaactagaataaaagttccgtggctaccaattccaagcgtgtaacaccattgaacatgttaactatctatctttttttaatgttgtcaaaagtcccttattttatcttactaatcacttaccaagataatatataataccaccttgcattatttaagcttatgctttaagctaaacaaatgaagggattatctaccccaagtcctgaacaaagtgaaagaacaagaatggaatgttgcttagatttaatatcagatggatccttccttcgattgtggctgctcctttggatctttgaacggtgctgcttgctttgggaccccactaaatccacagcaaaaggagaggcggtacagaacaagccaggaatgatgaaagaacaaaagggaaataaagcaatagctacagcacaagaaactactactaccagtaaaaaagaaagcacaacgagatgtgtttccctgtgctgttttgcatggagaagcgtgttgccttgcttcagagagaagcttccaaagttcatgcaaagatgatgtatccctgcgatggagcataaagtattaatacgagtatcatagttttgtttcaaatataaacttgggcttcacaagggctgtaatgatactacctcgatttgaaaatatgaggcgtccttgttttccgcagagtcaataattaatttttttactaataactaaactaaaaatatatgtgtttcatggcatgcatgtagtatcgctagatcgtgtagtatggctgtgtctaatgacagaagaagctggaaatgtaatccatttccgttatgtaaaatattttcaaatggagggagtaccttttctttgaaaaacaactcctgcagaatctacctaaacagccttcgattttgcatagtgcagtttctttcactttggagaataattccttgttgcttgcttgccacaatggccatgttggtataaagcgatctcttgaggccgatccgctttgagctttactctttttggaccaagatctcactcttcactatcatggatgcaaatccaagaggccctatatctacagacacaaacagctcacagtttccttagcttccacccctgcacatttctgtctcaagttcagataggcacagaactgctaactttctttccagtcgctagatcacaagctagaggagaggttgattgcgattgagaatgggtgctcactgccatcagctcgccattctcgtcgttcttgttcttcttgcctccacaccggaggttcttgccgtccgaagcctgggtgttcttgcacagacaagcagtgcaaatgcctcgtcggctgagcaaccgcgaaagcttgcagagggcaatgctgctgttgctgtcactgctgctgctgctgctgcagctgcaagatttgatacgtcgacggagaagaacaccgcggcgacgggttcttcttccccatcgacggtgtttgatcccgacaggatgagcaagcggcgtgtccggagaggatctgacccgattcacaacaaatgctaggttggatgatcttcagaaatcaagtgttgtctttttggggtgtttttgggttcacttgttctctgaaaatgttcagaactcaaaagggagagatttcttataggaaatacttgtacagtcaagggaagtgtgtgcaaggctgtagcttgaggaggaaaaaggttttgaggcaatatgtatacatcgcgatgtaaatcaaataaaagaagagttttgcatcaatgaaaagaatgagaaaactgcaggggaatgatcttctggttcatgaagattcagtttcaactcttggggcttccttctgtgggtccaagaattttgtgttcatgtactttcttttagagaaactgtgaaacatattgttttgcatcttagagttgtgtggtgcaggatcattctgagttctctttgtggaagagcagaagattgtgaagcagattcttaagattcaaaaggtgaatgaaggacaggcaatcatcaaagtaattggtactagtagttgcttttctgtacctactctcatcgagcttctggttgttgaattaaacgagagacttcaatccttcagacctcttgggtaatcctgaactcatgcggcctctctctttgatcattgatcaataactgttcttctcaatatcctgtccgatgcaatgtgtgatcttgtttggactagttgtaataagaatttcgtgcttatgccttgtgttgtatgaaaattttagtgctacaacggtgtttgttaagtgtaagaaaaaaacaaataaaaaagagaaatgcaggtgattaaaaaagataaaataattgtcaatttcgtgcttgtgcctgtggcgattgaaaatttgagtgctacaacggtgtttgttaagtgtcagaaaaaaataaaaaggagaaatgcaaatttgagtgctacaacggaaaaaaaacaaataaaaaggagaaatgagggggattaaaaaagataaaatgattgagccggtgatcgaaaatttgagaaatgccggtgattaaaaaagacaaaatatttgtcaagaatgggattcgaacccatgccctttcggaccagtacctgaaactggcgccttagaccaactcggccatcttgacctctttgaaagatgcacttctgttaattatttatctatgatctgaactcaaaaatcaattagctattctgtattgtcaggcatggattatgtttgtccatcagtgagtaaccgatacatcagatagtaaaatattgttctcgctctctggtattgcctcgcgtgtccaatagattgtaccgatgatcatttacgagcaccaaacggcttacccttacattacacgttacacacacccttttcattgacctctgatataaatactctattcggctgtgttcgcatgcaggggattccctccgcacggaaaaccaaacggttcattagcacgaaacggttcattagcgtatgattaattaaatattagctaattttttttaaaaaaatagcagtttaaaaaacatgcacacggaaaacgagagagaggttggtgcacgcggaaaacgagagagaggttggtgcacgcggaaaacgagagagaggttgggaacatggggttccaaacacagccatcatgtttcagctttcgggtcaatgcaattgaagcatggcttgcgtgtgtagagcttacaggcttccacagacgtgaaaattgtggttctcaaaacagaaggaattggtaaacagaccaagacgaaaaaaaaaaaagctccggatttgttggaacagtagctggcccgtcgcagcacgaagccatgaacaagtctagtgaccctggaacaagaattcttcttgttaatttagcttatattcatttattgaaaggaatctctttatgtgcagaagaagctgaaagccaatcacaaaagcattcaagcctagctgcaaagtttatgcaaatcgagagatagacacgcaacacttttttgctgcaatttggccattgaaagtggctggtgcaaccggcttgcagtgtacacagagtcagggtgtagaaggctcaaggtatcttgtatgcactcacaagatatgcctgttgccagcaaattctattgcccttgttctggatgaggtgtggtaggagattctggcgctacggcgaattgcatagtccttccatttcggtggagtatgattgccacttcagttggtagaagcattgcttcttcctgattcaccaaagtaaataatgtaaactgttaataaataaaacaggtgaaaattaaggatataccctgtgataaagaatgatgcacatgctcaaacgaattgtattgtttgctcataagaaaattgggagaaaaaacagcattatccaacctgctcagcacaactgattggtaagagactacttaaaaacaactcaaacgaattttattgtttgctcatatgaaaatagggagaaaaaacagcatcatccaacctgcttagcacaactgacgggtaagagactacttaaaaacaaaccaaccaagacactagattttttgacacagtgactcacgtttaggcagttaggataaactccaacccgatagccaggtcccaactgtgtatgtgtggtgtggacgaaaatggaacaatggcaattactacctcacataatatatccaacatacatttgtacaatttgaatctctggttgcttgacatgcctaacccttattataccatcatatgttcaaaagtgcaaaatagcaagctatagataatctggaatattttttgcctgtggattgcggatacataaaagaacaaaaggatttcgaacagtcaccaacctgtctttgtctttgacgttgcatgatactaatagcccaagccatgatatagcatggcagcaaaaatccagcagccctcaaaagaaacaactgttaaagatcagcaactagtgaaatgcacaatgaaggagcaactaaataataacagatgttaaccacacactaaaactgcaaggagtcatagcttgccaaatttaagtgtggccaagttaaaacatgaaccgatagcagagcatgactgcataaaaaaaaatctaacttaccgagaaaatagcagatgcgtcatcttcatcatcactactagtaatggttagtgtatgccttaagagtagaagagccattagctggatagacaaagcaaggacacatcagttatcatccaatccaatattaacatggtgggcaatgacagtattaaacaatgaaagaaagaagtaaagggattcaagtgcatgacaagattgtcctccttaatgatcatgaatttacattaacagaaggtaaaatattgcatgtttctagaatataaactgctaacccttttaagacttacaattagaaatatggagcggcaaaaggcagcagcattgttgtttgttgcagtatattcatcatactcatcttcaagtaaacggtgttgagcggcagccatagccaagattctaggatcatgtaaatccaaccgattgccagagatagaccaatctccactactggagaataggacgagatagagacacgagaagttaagaattgtgcttagggattattttatattcactcagaaatttattcacaaaagtactaggatacgaaagaagatttttcatgaatgaagataccaacctgatctctatagtagtctcatcatgatgtacctggggtggggcagtatagccaggcttgtatgactgaacaacagagaagaaaaactcataatctgatttacagcaagaaagctcacagttaaatcgcaagaaaacatgaataattaaatgcatatggaatcaagtaatcctccaaattaatccaagctaaaaaaaaagtctagcttacattactatgcagatacatgatcacatttacttatggtactttctaatacttccataggatgtcacattttcacagaccaaccgaaaaacatgtagataaacatgatgcattggaatttgaaaataattaaataagtttgatgtattcaacctgctaaacattttttaagaacagaaaagggtcaaatgactaatttttttagtcctgacaagaaggtactgagaaaaagaagtttgactaagggatatacatactgcgtatcatatgtcaaggggaacgaactaaagctttccttactaatatttgcatgccaaaagaattgttatgtaattggattgagtgagccaactattaggatgcccccatattcacccctgttgttgaatagaaggaacaaattatgccacaaggaactaaagcatgcaagaattacttaccacgtggcagatttcacagattatgtctcctttctcattgcaccatctttgcacacattctctatgagcgtactgcacaataaaatcttgtagatcaaaaagtagaaatatagacatgacgtacaaaagaaatacagtaaaacaaaaaaaaaatccttaacagattcaatcacagcatgctatcaaagttaattatggtgagcagttagatcatgacagtgacttgggtgccttaaattgaaggcagttcacaaaagatatctagccattatcacttcatccataagtttgcctcaagtagctaccaccaagaaaaaaaggttgtccaactctttaagcaacaatgatgataacaagcatgcacctatttactcatactggaatcactttatggcgctacttttcctgataatatcagtagccatagcagcagaaaagattgtatccaaaacacaactaataatacacggatgtgattaaaagtcacatcaaatactccagtaatgtctggtttatgggatgtgaggttccaatcagcatgcagtccaaccgctaagctatttgtcctacatagctttaagccccaaagcgcaaagcatagcgtgtgtgcatagcacatcgtcatatacacatgcattggtatggatatatggtttcacgacctcctcattctttgcaacactataattcattatatatcaacaacgatcccatgaaattgaggcaaaaataattttatcgttaatatggattggaacaagaactgctcgcttggatagaagaaacaacataccttgaggctaccgctacaagcgcaggggctctcgaggttcttggcgaggtcctcctcctggcaaatgcggcattccaccatcccaatcagcgcccccgtttcctcctcgccggcgccccgggacgccatgagccccccaacatccaccgcaacatgatcccccattccagcaaatcacccaaaaaagttttaaagaaaaaatctccacgctcagcagctctcacgacctgcaatccaacaaacccttcgaatcgtcaaaaaaaaaactcaaaaaccgcaaaccccccacaaaaatacaaaaacaaaacggattggaggtaagaaccgatggggctaggggctaaagccctagaaatcccgtggcgagatcgaagaagcgggattcgggccgaatcgaagctccccccgactcgcgggggatcacgacgaggctcggattacccccccacgcgaccggaagccgaaatgggggagaggaaagggagggggattttacctcggcggaatgagctgggaagcactcctcctcgaaatatctccaccttcctttcttttcttttcttttctttcttcttcttcttcctttttttttctctcctcttcgcgtttgtctcgcgaggaaaacgccactcgtcggtgctttttatcccgcgccgcgtgatgggcgtgtgacggacacggacggctcgccgtcacgacgccgtccgctcaccggcggccccgccgtcttctctgacggcggtgcatgcctcggcgctcctctaactgacatgtgggccccatccgcgtggggccaacgcatcattgaggattagaggtagttggggttcatttcggttttgccctaaggatccaacggtcatttcgggttcttatccgctaggacattatccagaatccattaatatatccagagcgtatttgctagcagtacaccataattgtctcccatttcaggctgtttcttattgtctctgttctaaactaagttaatctactccctccatcccaaaatataagtatttttataatagtgtcaagtcaaacggttttaactttgacagttaatagcaaacaaaataaaaaagatcaattatataaaattaatgttactagatttatcattaaacaagcttttataatatgcaactcttttcatttaaaacatcttacttttataaatattgttggtcaaaatagcatctcggaaaatatgccgaatctaaaaatgtttatattttcggacagatggagtaatatgtgatgtgaaattatatccggattcgtgttactagaaagcatcacatctcatactacattaaattctaattaatctgggcatacaactttagttcttatttttgctgcttttcataatctttttcttatttgatatcctaagtaaaataaagtgtgtgtgcatgtagtgaaatacacctattggcaaataaagtagagtgcatgttgatgtttgtcacagacgacttactgacggcgccggattcgactgtacgtatattgtgtctgataggtcacgcattttgacatggtaaaaatgacataaggcgtggaatcagattgtctaaagtacgcccaaccccaggactaatcagcttataattagccattagtccattacacgtaaacgtagaccttttcgttttcgcatgcaatttgcttgtagaaaaatatataacagcggtactaggtagaccgagtagtttgtttcatgctatgttgaaattaaattaaggagaaacgatgaatggttattgcctcgtggtagcccaaatctttgagagagaccaattaagctttgatgatgatactctctctctattttaatgtatgacgccgttgactttttatcaacgtttgaccattcgtttaatttaaaaattttgtgtaaatataaaaatatttatgtccagcttaaagaatatttgatgacgaatcaagtcacaatgaaataaatgatagttacataaattttttgaataagacgaatgatcaaacgttggataaaaagtcaatggcgtcgtacatttggaggtagtatattgcgggacgtgaggcggtcgcggtggcccccctctgccgccggcacgaattcacgatgcgatgaccgatgatcatgcagctttcattctcctcttggaaaaagtatactttgactccctcaactaccgtctgagtatgattcataacctccaaccacaaaaccgggtagatcgactcctccaactatcaaaaccggtacaaacaatgtccctctccttcccttcttcctcccctctttctcccttatctctctctttcccctcggcctttctcttggccggagcagcggcggggacagcgatagggcgcggtggcggcggcggtcgggagcggcagcggcggcggcgggagcggcggtcggaatacgcccagaacctgttccccaggacggtagaccacacatatgcatcgctgggctatataaaggaccttagctagctcaccaactcgaacctggtgttagctttggttagttcgtttcgttcgtgcaggaggagagaacatcttcagggccttctcgtctcgtctcgtgaaatcctcatggcggtccagtgcagccccgtgttcctcttccccgcctccatgctggctctccccgccggagcgctctttgtccttttcttttgcgcgatcgatgtcatcgacaatgtgtggggtgtgcgttcttggattgttcggcgcctagccaagaatttttctgccgtggcgagggcgaaggtggacggctcggggtcggggctgaagccagtgcggcggtaggcgaagcggaaaaactggagggcgaggtcggcacggccggcggcggcagccccagagatgacgtcgtggatgagcggcgcagcgagcgtcaaggagagcaggcggatggagttactcgaggcggcaagcctcgtccccaccataatcgccgccgctcctgaccaccgccccatcgctccccaccgccgtcgtcctgaccgctccccatcgccaccaccaccggcaccgccgccgccgctccccaccgcctcgtcccgaccgccgccgccgccgcttcgtgccacccccgccgccacgctagccagccgtcggcgactccgaccccccacgggggcggctcccttctcgtacccctccctccctcctgacggccgcgggctatagccgcgttctccaccgcgcgttacccacctccactgccaccaccgctccccaccgtcaccgccgccgccaccgccccgtcgctcccttccgcctcgtccccattggccaccaccaccgccgccgctcttgaagtgagagagagataagggagggagggagggagagagggaggatgacatgtgggtcccacatgttagtgggtcccacaacactttttttatgtgaatgatatatgggtcccatattttttttatttttgtttttattctaacgccacgtaagcgccacataggacaaagaatcggtcaagactgtcacgtgggcgccacgtcaaccaaaaccacctccaaaatcagtgaaggacattgtttgcaccggttttgatagttggaggagtcgatatacccggttttgtggttggaggttataaatcatactcggatgatagttgagggagtcaaagtatactttttccttctcctcttcgcgagctgtaaaaacaagcgagatggcggccgccgcggtccggtccgtttcgccacctacgtgggaggagaggcctcccgttccgagcccacctcacaaacgaaagcgagcggtctacagcctacacagcccagcgagtatgatgcctgctgtttttttttcttcgccggtgggccgtgtgttcggatgagatatggtcatttagggctggtttggttcgtggcctaaattggccttaccaatttttgttaatgttaaattttggtaacttttgtcatggctaattttggcaaaggtaaaattgtgtttggattgaagccaaaatagcctaaattaactgttgaaatggcctattttcttaggcatgccaaaatttggctccaaaccaaatagacaataaacactattgaaattgccaaatattggtaaggccaatataggactcaaaccaaaccaacccttactagaaaattggcgtgccggttggcacgcccaatctttatagcccgtaatttttttaatgtcctttaaaatttgagtttaaaatagtgatgaacgaaacaataataatagtgctggtacatctattggtttctgacataaacatactatttttatttatagtcccttgtaaaataagaatactacttttacatcaattcctgtgaaattattatggaagtcgtacatcaattcccgtggaatattccatacaactctttaatggggttttacttttgtgtttgtaaaaatgttgcagaaagagtagtaacaaatgctaactaaggtttacccggttaataagcaaaatggtgtttttaaatgaaatttcacgttttctatttgagcactcagaacctttgttttttttaataaaaatgtatattcttaattttttaggatgtaatgcgtattccaatttgaattcattttaggattgcatttttaaaagtgtctaaattgaataatcaatgtgtatcattaaaaggatataattattttttaccatatctattcatcctagatgggccatgctgcccatgcaagcccattggagcgtcaggtgcatattctggcccatgatgctgtacaatggcacgaaccagacatgcaaccgcttgtacgcgctcagcgctcgctcgaagattcacctccgtctaacacgcgtcacaaaaaagttgtgccatctggaccaattggcagcggcggaaccgccagcattagaagtattgatttgtttttaccattgtatagatagaatgatccaatttcttacttagtcggatagatataacataaacgaaatgcgccaaaatttagtggtgccaatttatcatatatattttaacaaaatataaacatttgagatcttgttttaaatatttaattgttataattgtgtaattggatcacatattatataaacggtttacgagaaaaaaatcatttgtatcttgctaatagaagattaaaccaatcatagccaatcgaaataggccacaccacccaaatcaaaatatgaatagcttcatgtggtcaaatcggttcggatccactcatccatcgtacagaggggatattccttttttggtcgcccatctactttgccctccaaacaaaacaaaaaattggacgaccatcttctgtacagcctcatccatccaaccaaacacaccctacgtttaggaggctaggcacatttgcacgtatgtgggagcctcgttccaagaatccaatcctcaacttcacaggtgagcggagaagtggcacccgcggtgtggtgactcttgttgtcacgtgatgcttgaggctcacctagaatatgttgttctcctaaactagggacggacaatgtgccagaagagattataaattgaacgtttggtttttttccacctctaataataaaatattttagcactaagacaaaaaatatcacaatagataaaaaatggtgaaacaaagtcggatctaagattaaaacatttcattcttcacaaatgaaacattgagcttcaagcgctgaaatatctatatatgtgcaagaaccgaagacaaaaatataaaacaacattaaagtacctagtgcaacactgatacaaccccaagaaacatcaagatatgttagttgaaacatcaaaaaacacacaaaatttactaggcttcttcctcctctcctatgaccaccagctccttcagtctcatgctaggacactgcggacccttttatctccattgaagcaagcaataaccactctcccagagcttcatcaccccatcgttgccagccctcagctacgttgttgtcactgctcgggcgaatggaagccgcgtcacctccagatctacatgggacccatcgtcttcctccaactccttgacgtcgagttgtgccatgagaccttgccgaagagcggcacgggaggatgcccccgctgctcctgtcagccatcgtgtcaactccgctttgttcgctggctgatgcaagtgcctgcgcaggaaagagacaaagaggagggagggaggggaggggggggggagagatagtcatgagagtggaaataggtgattgggagaatgcccgatattttttctttttcctttctcgtaacaagccagctcggcttgctaagtcttgttatcttaacaagccaactcggctcgactcacgagctaactcattaagctcattagactcaataatgtatttatacaattttatattttaaatttatcattttatcatatatataaatacaactaactaataaaaactcactaaatacaaatagtttcgatgtaactatagaaaaaacactaaataaataaaaaaatggtgatcgcttactaaacgaatagcttgtgagctagctcgttaaactcacaagctaaaacccaaccaattaagactacaaatttgagcagattcaaattaagctcactataggtggtgtttgaatgtcctgaagatgaagattaagtgtttcacgtaaaacgaggttgtaataacgtgtaattaattgagttttaattatttcaaacttaaaaaatagattaatatgatattttagaataactttaatatagaaagttttcacacgaaacgtaccgtttagcagtttgaaaaacgtgtcacgagtatctaaaatttaatccaactcttaacggagaaaagaacggggccggcttcaagccacgagcttcaagccacgatcgatgccagcacctactggccccacatccaggggcattcatatgtagtactacccggggcctgtgactcagggtaaattattcaatcctattttaacttatactatattagttagttagttaggggaaactattctaaccctcgagtggatgtttcctcgtttactcaaaaactatctaaacggttatgaaaaattctagaaaaatttggcaacatttatacaacacatatatataactccacaaaatcttaagtccaaattcaactcacacgtcgagatataaaaaagacaaattcagcgtatgaatagtagtgtactatttatatctaaatttgtcttttttgtttctcgatgtgtagatcgaatttgaatatgaattttggtggactagtgggtatcattatactctacattgttaatttgttcagaatttttcacaactatttacatcgaatttagaagaaaaaggtatacgaggggatatccctctcgagggattagaatccactcctgttagttagtagcaatactagcaaccaataactaggtactagttagcatgtattgactcccgctgatttttcttctgggttcgccattgcccacatcccaaacggcggcgcgatgcgattagctgattatggcgcacgccggtacgtgcgcgcgtcaattaaaccaaagcttgttagttctacttccactagcttattagtcgtgtgctcgcagccgcaggggagaggcaggttccaaggccggctggctccctccctgattcggttcgattcgataaacggggagaagatatcattttggatggagtgtgtacaatgtgtctgtgtccctctctttaaaaaaaaaacgaattgagaaacgatcgaggaccaggccaacaacgtgcgccggttgccgcccttgcaatcgtcttctatatacttttgccctctcgttttttctcgcccgcggtaacggcactactccacgcccggagcccggaggcaaggcatacgctgaacctgaactcgtcgtattctctctcctcccttctcctggatgatcgccgtatctccctaggtaattaagcatatatgcatctctgtgtctgttcgtgaggcgatttgatttaatatccgttttttcctctcttctttttttggactacttcgttaatttccatctccatgaacttgattcaagcatctcttcgtggtttgttgttgatttcagatagctttaatccatatatatatagccgatacagcaatcatgctagtgtttgtgttccgtttattagcttttactctcaccatcttgttatcgccgttggtaagagtggtatagttctggcgataaatcttaggacccttccatttcttttttttttgaagaaaattgggtagtaactctaccgatcaattaaggagaaagcatggggttttgcatgttgcaactaaggtgtttagtcagataaactcataaaactcaagggaagagaagagaaggaaacatgcatgccgctagagggctatggatgcacactcctctgctcaaagcccaatgttctctttggctttacaggccatttctgagttccgacaccattgtggtgatatgttagaaaattcttcgatttctctacttccagaaattcaatagaatataagcgaacattcatggttttctcttccaattttgttacgagtatccatttcttggttgaaaatttgctaagcaagccagaatgccacaacgttcaaagactgcgtgaggcatgtgcaggacttgacttcggctgagggtgcctggtccgctacggtgcatggtatgcttgccaattccggctgcattttcgtatcacctggttgtactccaggtagtggttgtagtacagatacgaaaattgggcacaaggccgtcggatttgacagtcattttcgtgcacagaaagagcggtagcagctaccctttccagtcaaccaaaactgctcccagtctatgtgctcttcttgtgagatctcagtttcttgaatgatcatttcctttgttgctgctggtcttaacatgtgatgacatgtcatcaactttagcatatttatcaaaaggaaaaaagtccacatacctccctgaactttgactgaaagtccatcaaaatatgtctgattggaaatgcacaaattgtagtactcctaagaagcagtaacatcaattgcattggcaggtgaaatgctggaccttgaccagaagcttggattgaagactcaggggctgcattttcattgaactcaggtgattgccacgataactgatggaaacggcactgcagatgtgggtgacaaagcgactcggaattacggttctaatcgtcctcttccctctgctgattgtgcatcatctgatagtgaatagcccagtgtcagggccatctcgataccaagtcatacattctaatctccttggttggttgagcgactcattgggaaattcagtggctcaaaatccagataatacaccagtagaagtgataccagcagatgcttcagcttcaaacagctcggattccggaaattcctctcttgaaggatttcagtggttaaatacatggaatcacatgaagcagttgaccaacatctccgatggccttcctcacgcaaatgaggctatagacaatgcaagaactgcatgggaaaacctgacgatatcagttcacaattcaacctctaaacagattaagaaagagaggcagtgtccatattctatccacagaatgaatgcctccaagccagacactggagattttaccatcgatataccttgtgggctgattgtaggttcttcagtaactattataggcactccaggtagcctctccggtaacttcaggattgatcttgttgggacagaattgccagggggatctgggaaacccatcgtactgcactatgatgttcgtctaacaagtgatgaacttactggaggtccagtcatagtgcagaatgccttcactgcaagtaatggctggggttatgaggatagatgtccctgcagtaactgtaataatgcaactcaaggtacttccaaattgcgtctttattgtttcttctttgccccgttacactagtcatctaacatatatcacagtggatgatttggagcgatgtaattccatggtgggtagagaagagaagagagctataaactcaaaacagcacctgaatgccaagaaagatgaacacccaagcacatattttccatttaagcagggacaccttgctatctcaactcttcggatagggctagaagggattcacatgacagttgatggaaaacatgttacctcatttccatataaagcggtaaccttctatctggaccatgataagtccgacatttactcaactcaattatttgactccttaccatatagatgcttctgtttgtagggcttggaagcatggttcgttactgaagtaggagtatctggtgatttcaagctagtaagtgcaattgcaagtggcctgcccacatcagaagacctggagaacagcttcgatcttgcaatgttgaagtcgtcacctattccagagggaaaagatgtggaccttttgattggtatcttttcaacagcaaacaacttcaaacgaaggatggcgatccgacggacatggatgcaatatgatgcggtgcgcgaaggagcagtagtggtccgttttttcgttggcctggtaataaaaacaaaacaagaatatgatataatagctccgtactatattctgacagtaaatgtattttttatttgttttaaaagcatacaaacctcattgtaaacaaggaactctggaatgaagcacgcacatatggcgacattcaagtgctgccctttgttgattactacagtctgataacatggaagacactggcaatatgcatctacggggtaaagtttcatgttctacctctaattcattcccttccatttcttgtttgtctttgcttagcacttagcagtggttttcccctgaacagactggtgctgtatcagcgaaatatctgatgaaaacagacgatgatgcttttgtccgtgtggacgagatacactcctcagtaaaacaactgaatgtcagtcacggcctactttatggtcgtatcaattctgactcaggtcctcacagaaatcctgagagcaaatggtacataagcccagaggtaatgtctgcacaacaatcagttctgtgcaatcaaattcacaaatctctacctgaaaaacatcaatattgtaaacattttcaatctgaactcatcgttgaaatccaatattccaaatacacaagctacaatatgtccgaggatgtttatactaaataaccaaatcaatttgcaaccagtcaccatactaagacaaaggggatcatagatgatatttttggatggtcaagaaacacaagtgctaactatgaattgtgatttgctctgcaggaatggcctgaagagaaatacccaccatgggcacacggaccaggatatgtggtatcacaagacattgcaaaggaaatcaacagttggtatgaaacaagtcatttgaaggtatttgtatttagatgtagacacaaacagtggctctgcacttacatgctaaatttaacttgaaaatttgctacagaaaatgcagcaaattcttatctagtccagcatacagcactgcaactgcaagctcatagaaaattattacaatacctaaaaccctagcttttcatttcctgattttctctcctaccagctgcaagattaggaaaactaaccatgtttgcaacccctggtttatgcagatgttcaaactagaagatgtagcaatgggtatatggattgctgaaatgaagaagggtgggttacctgtccaatacaaaacagatgaaagaattaacagtgatggctgcaatgatgggtgcatcgttgctcactaccaagaaccaaggcacatgctatgcatgtgggagaaactcctaaggacaaatcaagcaacgtgctgcaactaactgatgtgaaaagaatccccatgccttgagcatcttgtttatcttttggctaccaggacactcactgatgtcacaaggggcataaaaggagtggaatcttgctagccagaactttatgatgctgctgactgccaccattgatgatggattcttaacttcttttctaggaggctttaacatgtaacatataagagtaggcactgtcccatactgttgtaaatatggatgaatatatacaggtacaaatcataatcttcatcacagcttgttctaaatgctagatcaaactcttttgtgctagctggaaaaattctgggatccagtcaggtgtatcaactgctagtagcacacttacgtggcttgatccggaagagaagaggctgaatacaaacctcataaacagtcccaagggcaaatgtccccacggaactggttatctcgagcatcatagtcctcttaacaagttataaacaagctaaacacacacaaaattacccccaacgaagaaaaattcataaccccagaacaaagcattggtatcattattggttcttgacttgcaaagggtggctaatctgatctgaaaagagctgactgtttaacaaacataatcagatcttcctcattcagatttttccaactgtccaaaaggtgaataagaaaacaagtctttcacatgatcgcataaaatccttcatgatctcaaaacagtagcaaagtcaattagtgcattcactgagccaatgataaaattcatggcactccatgaagcatctgcatctaaaaaagcaatccaacgtgctgtcaatataactattgtggccagctaccatgcagctaaccttacggagacccgcagcttcaccatcaatcaatcccaaaattgcctctcctcaaacagctcatgccccagcgattttttttacaaaggctatgagatgacctgtaaaccaatcatgagcttagcagcaggatcctttttcttatcactcatttttttgcttcctggaatgatgcttatgcaatacccaatgaacattcattgaggttgtttactaatctcaatgcccctctccttgtgaacttcatatatctctgcctaatgcaaggccttatgctgaacccaaagtaacaacagaaagccattttattcttcgcattgtagctgatgccattcataacaccggaaaaataagcttcatcacgcacgaacataagcactgccattcatgtatccatactagtgcagctacctttctgtccatgcatatcatgcttccaacttagcgcacatcctcttccttgaatttaggccttatgctcaattttattcttcgaattgttggtgacgccattcatcccattcccaccggaaagtaatcttcttcatcaaacacaaactccagcactgctattcctgtacccagccctctctgtccatgcatatcatgcttccaactgcaaatcctctacctaggagccgagagagccgcgtcaaccagccgctctctgaactcatcatcgctaattgtcaacatgtccttgagcgacatctgaactctcctctccttcaatgcctcatgcctcggcctgattctcccctccaagctgaaggcgaagtagtgcgggaactcggcgagctcgacggcggggtccctccccatgcggtcggcgaggaaccggagcttgggcgtgaggttggtctggatcccgtaggagaggatggccggggcgcgcctgaggatggcgcagacggcagggtcgggcatccccgtggcgtcgcggaggaagaggagcttggggaggagggttcggtcgacggagaaggcgaggagcagcgcggcggcgagcgggaggggcctcctgcggagcgccacgcggcggcggaggaagcggagcgccgggcggagcgtccccgggacggacgcggcgaggaggcgcggggaccggacgaccgcggcgcggaggagcgggggcggcagcggcgcgtcggcggagaggaaccggaggtgctcgccgggaggggaggtgagcagcgacgggaacgccgagaagacgcgggcggcgtcgcccgcggagaggccgtgcgagaggaggagggcgagggaggcgcggagctgcggcagcggcgcggcgcggagcggcgggtggagggcgaggagagggaacgggtcgaggtggagctccgaagagaggaagtagagcttgcggcggaactccacgcctccgcctccgccgccgcgcgcgggaggggttggggtggcggcggcggcggcggcggcggcgggcggaggagggaggcgcgtggtggcgagcatcgcggtggcgcgtggccggatctctgtgtgggtttttcggggtgggaggaagacgacggagtgccggaagcgttatccactgctcgtcggatcgggcgttgcatcggttacgggccgagagccgcccgttcacgcgatggacggtcccgatcggatgctaattgtcagtcatacacgtcccacgcgaacacaccagccacgacacccgttaaccggaaaggatatttagcgatcgatcgcttccgatttccgtttcccataaccccgcacgatcagcccccctatactcctccctcttctcccctttccttctcccccttttctctttctaatacggtacaccacaattttttttaaaacaaacaaaagttagaaaaaattatatatagaaatactatatataaaaaatattaggtgtataaactttagatgtatagaaatactataaaaaatatttgaattcaaattcaaatttgaatcagatataattcaaatttaaatttgaaacgggtatataaacttttgacttataaactttaggtgtataaactttagatgtatagaaatactatatataaaaaaatatcaaatttaaatttaaatcggatatataaacttttgacttataaactttggtctctaaactttagatgtgtaaacttgagttgtataaactttaggtgcataaatttactaaaataggaaagtaatgcggtatcaaaaaaaaagaaaccaggtggggggaggggggagaatctgatcgctacccccattgccagggcgactgatcgcccattagaagcccccaagttaacaccacatgcaaaagagacgaagacgtcacacacataccggttgtgaatgcatccttaacacctactcaaagagatggagactagcagcaggggcggatccaggaacaaaaaaaattgggggggctcaattacgcagtcgcagtttctttaaccttcagccatttagaggcctttagtttatcatttatggtgaaaaaaattgaggggggtgctccggggggtattcatgggttttgtgggtgtaggagggacttgagtcccctagtcccccctgcacccatgttggatccgtccctgactagtggcacattcttaccctcagtagaattctatttaaaccttatttggttgtacgtaatatttgtaggcactaaaatttagacactagttggtgtgttatgcaccccacgactcaaccattatcaccataatactgatgttgcccttgtcgtttagatattaggtgataataccgatgttgcccttatcgtccagaggttaatcgggtgtgtaggaacatacatatttgaaaaaaaaaactcttctcagttgtaaaagaaataaatttaatataagattctatcaaataagtatgtaaaatctaatgttttatagtattacaatagagtggcacttttgatggtaaatctaagacattattttgtctgatataaaccgagtatttttatggtgttaaaattttaaaagtttgactttttaataaaaatatctatatcatgggaaaatagcatgcagggcattaatccacatgttaatgacaaatacaagtatacaacagtattttgcaatctgtgaattttttcgacggtatcaagcattagatgcgtgggatatttattcggaatgctaggggatgtgatcccgtctcctatccctgtgtggtatcgcaagtgtcacaccctgaagtttcctcccctttttcttgctttaaaaattggttaaataaattgcccgaagaaattaccttaattaacctagagctaaatccctagttaataaatgcaattagtaatcggaaatagcgtggtggaatttttcttgagttccccatgctccaatacattaacaagatttttagtggaattttcagagccttggaaataattttaaccaattaaaaatcaccaaagtgcaattttaaatcccagaaaaaatcctttcttctttttctttttttttccttcttttttctctattgggccgtcggcccactccctcccgcgctcggcctcctttctttgggccggcctgttccccttcccctctctccgggacgctgacaggtggggcccacctgtcaggtcgtccccttcctccagccgcccgccccacgatggcaaccgccgccgaaaccgcccgcgccgctgccttctccgctccacgtcacgcctccactccgcgcccgcacctcgcgcccacgtcgccgccctctcccccgcatctcccggccctcgcgcgcgctcgcaaggggcgggattcgaatttgaatcccccccattctctctctctccacccccacgtcgccggccaaatcggtcacctccccggccacgtccgccccctcccgcacctataaatcactccccacgtccccctctctcgtttttcgcactcgccgcgccctcccgtgcttcctatcatcgccgcgccgctcgccccttgcgccgccgcctaccgccgtctccggccacgcgccaccgccgctagagccgctgccgcgccgtgaagccgccgtcgtcgcgctcgcgggtgccatccgctccacggccgccgcttggttgccgccaatcacccccgaagccccgtttccctcgctcgccggtgagctctcctttttcatccatctccggccggccactttggtcgttgcggttgtcctctccacccctaatccctcttctcttttcctataggtgtcgcctccgcccgtccgcccctcctcgtcgccgggtcaccgccgcctttcatcctccgctctggtcgccgtgctcgccggtgaggctcccctctgctcccctttttccctctctcccgtgtgcgccgccgtccttcgcgcgtgcgccgtcgccttcggccgctgccgccgtttttcgcgccgcccgccgccgcctcccacaccgccggttgccaccgccggcgaccgcatgccgccgccgttcaccatgcttgccggccggcttgaagccgaggcccagcccggtggctgctccctgcaccgtccgatcggctcgggccgatccggacccttggccccgtggaccggccgccttgagccgctgacatgcgggccccgcttgccggcgccgccccccctttcgctgacgtcagccctgagctttattgcgcaataaaatgattaaggctttttctttattagtaaaaatacagtttatcttctaaaattcataagtaattcatccgagctccgtttaagtccattcaagtctcagtaaatcaagaaaaatgcaaagaatccattaaaaatggttttgtttcctgtttcagtagtcttatagcatgttttgcttgcgtgctttgtttgtcgcgtaggtttcggccgtttcgtcgatccgcggtttctcgaagacgttgctgaggtctcatcagtttgagagcaaggcaagtcatgctttacatttgatcattttgtacccaatttacaaacaccctgcatttctattaaatgttgcattcttttacaatgtcatgtgggatgggtcctattactcagccatttattgtttaccatatgccattgataacctgggtatcaaaatgattagatgttggtttaggaaatgcttagccatgcttagctccactagtacacaaaaagggatcacattattacatagactttgtctattagcatagttttggattggtgccaccgcaatggtgttagttaattaaaatgcactgaatggtgggctgtgggtgcatggttttgctggtcgcacccatggcagttaaggaccggttcacgggaaaccctgggagacttaccgtgcttaccacaagcgggagtgggtaactgcttgatctgaagtatagctcgaccctttcctaggcaccggtggcgagggtgggcgtgatggagttgggtcggccgaggtgttcggttgtccagctgccggattcaccgcggcgcaagaggggaccgtccactgccttttgaggggtgggggtgaaaccttagcgtggtgtggatggttaggggagggttatgtggagggtcttgtcacgatttccccctttgcagtatcatggtgatacttcggggcatggcgacatgtgtggaatcgtgtcttgtgggtacagttgtacacctctggccagagtaaaactattcgaatagccgtgcccgcggttatgggcgatcaaccagattcaccgtgattagtctcacccctagtttagcttaatgaactggtgtagttcaggtggttggttgggcctgttgcaacgtggtgtagcgttggacagtgattggttaatattgattaattactacagctgttttactgctttcaactactgctttgaaatgcctgctttatgcaaaagaacccctagcttcctttggttatatcctgcatcatacctcctcttccggtatgacttgctgagtacagtgggtagtactcagtcttgctctcttttcccccacaccagagttgaagttcttctcagttggagccgtctcagagaggttggtttcgtcgctgccgtcaaggtttgcctgtggagtggagtcgcccgctgctgaagtcaagcttcccggtttagctcgcttttatctttcccgctgcatttgtaatcttttatatttttgtaagatgtgggtctgtatgtcaacaattgtcgtttgtgtactctggctggtcctggacagggatttaatgcacattcagcttagaaattctggttcgagaatttccgggtgtgacaagttggtatcagagccgaccttgaccgtaggacaagccaactggaaacctaagagccctctgaacccctttttttcatatgcatatgcccttttgcacttggattttgtttcaggaaaattttggggtttgttcttttgatttgtgggaaaaatcttggtcgcttatttaattggatttctcgactaggtacagtctagggatttagtaaaagtttattcagaatttattcggcagtcggtcgggaattgtcgggtgatatgcattaggtcgtgcctatgttcggtggggtaagtttatgcgtatcagtatgactatgcatctatttcatgcattaagttattgtttagtcagttgcattagtgtcttttgtctcggttcgtgaaaaatgttgttctatgcataaaatcatgctcggttatttatttgagtcttcttttgctttgtttaatttggatttgagcatgaattggttcctatcccttgtcttctttagatgtcagtcctatccctcgtttgcaagcgccgccccgagcttcagagtcgccgcccttagctttatcgccttcttagtctgtttgcctgctagttttcgtgtttaggtttgttgcttgtgggttagtcggcggtcgatatcatgtgtcagtggtatgactgcctcaattaggagttgcgtgcctctttttcagtgttttaatcaagattaagataattgcacttaaattcataagcaagattagtttctgagccccctgtttttcttccttttctcatatttctacctatccccttcagatggagataaggaatggttcacgcgactcaaacaacgccagtggcagcgaagagccgatcaatggagcacgtgccaacagtgcatctgacaacagtccgtccccaccgcccgagaacccaacaattgctcaggtgttggacaatcagacgcggatgatgacaatgatgatgcaacagatgcagcaacagtaccatcaggtgttgcagcaggtgcagcagcaagcacagcaacagcagcagaacctgcagtttggtcctccacctcctcagtccaaactgttagaatttcttcgtgtcaagccgcccactttctcaagcaccaccaacccaatcgaggcccacgactggcttcatgccattgagaagaagctgaatcttttgcaatgcaacgagcaagagaaggttgcttttgctacacaccagctgcaaggtcccgcttctgtttggtgggacaactacatggtgacccgtccagctggggcagaggttacttggacagagttttgtcatagtttcaataaagcacaggttcccgagagaattgtggcacaaaagaagagagagttccgttccctgcaacaaggaaccagaacagttatagagtatttgcatgagttcaaccgcctcgcacgctacgcccctgaggacgtgcgtaccgatgacgggaggcaggagaagtttctgtctggtcttgatgatgaattgactaaccagttgatctctagagattatgaggactttgagaagctggtggataaggctatccgtcaggaggagcactgtaacaaaataaaccgtaagaggaaggcagctcagttcaggactccccaggggaagtgtcagaagcctcgtttcacaatgggatatcagggtggaccttccaccatgattatccgacagcaccgtccctaccacccgggtagcttcaacaagaaccaccatagtggcagtcacaacaacagtgagcagcacagcttcaaccctactccgagttcactaaagattccagcccaatcagttcagccagctctgctagaacagcccaagaggttgggagaaaaacccgaactctgcttcaattgtaacaaacccggacacacggttggaaagtgcccgaagccaagacgtgatggacccaagttcgttcaggcccgtgttaatcatgcatctgcagaggaggcgcagtcagcaccagaggttatattgggcacattccccgtcaactcgacaccggtagtaatattgtttgattctggtgcaacccattccttcatttccaagcgttttgctggtgcacatgggttatctttagtgaagtttaagataccaatgcgagttcatactcctggaggtggcatgaccacaactcactactgcccatctgtgacagttgaaattcaagggttgatttttccagccaacctcattcttctcgaatccaaggacctagatgtcatacttggaatggattggttgacaaggcacagaggagtgattgattgcgccagccgcaccatcaagttgaccaatgcaaaaggagaggtggtaaccttccagtctccagtgccgcagaagccagggatcagtttaaaccaggctgctggtgaagaacaagaggtagcagtggagaaaaccactaagaagctggaggatattcccatagtcagagagtatccagaggtttttccggatgatctgacaacaatgccaccaaaaagggatatcgagttccggattgacttggtacctggaactgcaccgatccacaagaggccttacagaatgggagccaacgagttggcggaagtcaagaagcaagtcgatgaatagttacagaagggatacatccgcccgagcacgtcgccttggggtgctccggttatctttgtggagaagaaagacaaaaccaagaggatgtgcgttgactactgcgcactcaatgaggtcaccatcaagaacaagtatcctttgccaaggattgatgatctgtttgatcagttgaaaggagctactgtgttctctaagatagacctgcgatcaggctatcaccagttgaggatccgcgaagaggatattccaaagacaacattcatcactcggtacaggttgttcgaatgcacagttatgtctttcggactcactaatgcacctgccttcttcatgaatttgatgaacaaggtgtttatggaatttctagacaagtttgtcgtggttttcatcgatgacatacttatctactccaagtccgaggaagaacatgagcagcatcttcggctggtacttgaaaagttaaaagagcaccagctatatgccaagttcagcaagtgcgacttctggcttaaggaagttcagtttctcggtcacatcgtgaatgctcaaggagtagctgtggatccagcaaatgtggagtcagttaccaaatggacctcaccaaggacagtcactcaggttcggagtttcttaggacttgcgggctattaccgccggttcattgagaacttctctaaaattgctaagccaatgacacagctattgaagaaggaagaaaagtttatctggtctgctgaatgcaataggagttttgaagaactcaaacgacggttggtgtctgcaccagtcttaatcctgcctgatcagacgaaagatttccaggtctattgtgatgcatctcgccaggggctaggatgtgtgtagacccccgattttggaaatcggaaatcttctgtgtttatccgtaccagtccctggatcagtagttggtacacacatacatagttggatcacaacatatcacgaatgaatttaggctaaaagagttaaatacttacattagggccaggtaggccaacaactatcagagaacaacagcggaagacaaaataatataagggcccggttaacatgccacaggcagtcgactggggaacgagacctagaacaagaccgcactccgatcatcttgtgggatacgcaagcgtaccgacaagggcttctcttcaacactctcctaaaagatatataaatagcaagggtgagtaccaaccgtactcagcaagccaccacaataacaatgcatatgatagagggtatttcaaggaatggcttcaggtccttttgcataaagctaattttacaattcttttcacaagcctaaaacctagcatagactgatcaaattttagtaccagtgttcactttaaacaacgacggttctgtccaccatccattgtgatcccaaggatagcttcccgccattgaatcgtcatggttttctgaggatgtccaccttccctcctctcgggatgtggctccatcagcataaaattcatcatgcaatatcccattccccacaagttaagaatttagagtctagccaagtgtaatacatgtcccggtgctcaataaccgcgagcacggctattcgaatagatttggtttactcacactgcagtggatgtacactttacccgcactccgcgactgcccaacacatgagcctcgtcccaactcatgagacgcgtcacggcaaagcttttcgataacctcgcattggcagtacccgctccatgaacttaaatcctcatgcactctaggcgtccatgtttctagcagtgagaggagttctggcgctcccgggaaagagaagtctcacacacatattaaattatggttcaagttaagttctctctctcacacactcatggcagtcctaccaatggcgacaccgatgtagggcacgcctcttggccctacctcaacggctgtcccatcgtagcgcacctgcctcacttaggggtgaaccatctatgcagggatactgcctccgctcggctatctaatccgctaggtctatacccattcgagaagtacggttgtacgggggtcgtttcatgcttaacttcatggctcggtccttaattgaccggggacggtactagccttttccagataccacccaaatcctccgtccgccccagtcgaaaacagttgtttaattttatttttcctttcacaaatcatgtcatcaacatcatggcaatgtggcgctcatgtctccacatgccgcatctcaattaccttcccaaaggtaattgcccaagcatatagcatttgataaatatgagtatgcataattctagaatagcatttctaagcaattgtcatagttgactagggactcatacgtaatcatgggtacaaggattttaagggtaaacaataatcaaggcatggcataatcacaagtaggacgttcatcattgcatgcaattttatttgtaaacaaaacaatttcgcaattaggatcaacatgttcaacgaatagtgatgacttgccttgctcaggatagtccttattcttgatataattcttgatcaaccttcacctcctggaagttgctgacgttgcctcacgactaaccgatacataaattctataatacgcaagaaaaaccaatattcaaataacaaccaaatatgcacaacaaaatatactattcatgtctgctaatggattccaatctcgctaggggctaaggtttcttaatctttctattatcaacgtggcctatttaggagttaaccaacatagcatttataggatacatatatatttggctaatcggtggtttagtctatcaaatggctatggaaggattatggctaggcatgcatttatctacatagcacggttatacactagaggttctgttgccggatggattttggatcggtcaaataattactgtgaatcatttgtattattattttattaatggaggctttattttaattatgtacatatttcacttgtcaaaataaattataaaaggttaacaattacccatgctttgtatgttagaattgtttaggttaatcatattatggttacggattatcccatcacataattttacaatgaataatccaaatttacagttgatctgtaattatacgaggacaagatgtataactagtatttatctaatattcagtttgtcatatactccctctaaattaatatacgcaacaagcaaattaatacgataccatatatctataatgggatgtacaatatgtgtgtgcacaatatcttagtatattgaatcatttatttgaatagtttctatttactgcttggttaactaagggttgctcaccttgcctactatatgctattatatgggatatgtcgttgattaatttcatataggtgatttaatcacactagctctgttattatttgccataaacaagcttaggaccgttctatgtgtatctatattttacttacctaataattataaggctaactctatttaaataactaataagtcgtgggttttaattatatttggacatagattaataactggcactaatattttcctatatatccattaatttgaaggattgattataactaatttatttagttgctacagcgacaagacatgttaaagataattatgctactgtacaatatccatttttattcattggcacactatttaggttaactatcatctaattatttgatattagttaagttataattataaatatattttgttaaatagtgaattatatatcattggaaagcttatgaatttagatgaatttaggttcaagtttcacttaaatccgagtaaaagtcgaatgcgaaagtcgattcctttttattaactttactatctgcgaactacggcaaacccaatttcgatttaaactattttgcgggtataaatattttgttgtcataagttttaaatttactcatcctgagcattatatccatataacaggttagaaatttcgattacgagctaaatatcggacgaaatcttagaaatattatacaatttaatttagtctatgactaaacgattaaatataatacacggctaagattccaagtaattgaatccgaatttctaccgtgaaccgatgacttatagagattaccaaaaataatctataataatctataagaattcatctaattgtttggttattaattatatctaaattactaccaattttaatttaatctgatccagaaacatatatttataattaactcggaatttcgatcgaaatactattacgctcgaggaatttccaaaaataatctatgattaaccccgaccatttttatttcctaaatcctcctaatttctcccccaatttcccttctattttctccttttcttcttttctattttccctctttttctctcctctttttctttttctctctttgctctccctctctttctttttctctcctttttctctccctctctttctcttctctgccggcctctcttttctttttctttctctcctctctctcctttttccttccttctctccctcccggctcctttctcttcttcctcggcttctccctcgggcggcgacggcggtgggcgcgagatggaggggggggggggggaaagacggctcaccggtggcggcgacgacggcgacggcggcgcaggacgcggcgcggcacccggtacggtgcggcgtcaccgtggtcggcggcgcggcggcaacgatggcgacggcggcgcaagtcgcggcgcggcgcggtgactttgtggcggcggcgcggcggcacgacgacggcggcgcgtggagaagggggaagagggagaggagaaaggaatggagtgggaaataatggagaggggtgggggtgtttatagggaagaggggaagaaggagaggggaggggcggcgacgcgacggtggtgacgcgatgggtggcgacgtgatggcggcgcggggctcggggcggcgcggggctcggcgcgcggtggcaggcggcgatgggacgagcggcagcggtgacacgacgggcgcgcggcgcggcgacgggatggtcacgcggcgatgggatgggcgggcggcgcggcgcgggacggcgacgcgcggtgacggcgatgcgacggatggtgcggcaacggaacgggcgcgcggcggcaggcgggcgcgcggcgcggcaacagcgtggcagcggcggcgcggggcgcgaggcagcggcacggggctcgaggccgacggcgacgatggcgacggcggcgcggcgggcgagcggcgcgaggcggcgacgacagaggagaggcagagcagcgcgcggcgcgcggggcgcgagggcacgcggcagaggaggggctagggctagggaacgcgatcgaacacctagggggcaatgaatagtgacttttcctatttatcccgatttcagtttattttccatataaatttgattctataatttctaaatcttgcataaataaagtttactcaatatttgtgttatctcaactaatgaattcaccctagattaatattactcatattttatttttatataatttatttgagttttaattagggttaattcttattccatcgtacttaaatttaattgatccaaatatggtcgcgataatattttatttatttctatccacacctaatctttattttaatttgtatttactcctaagcatttgggtgaccatattaagtgctcaaatgtgaattttcccaaaatttaatattgtccaatatttaatatatatcctagatttttataattccctatatttgggattttggtatttatatgttttcacatatattggtttatctttttggattggttttaccaccacatggatttctataatttagcatttgtgattcaattcaaattatataatatctaattaatttttcccagtaaaactactctatagatagagttccatttatttgaatgattatcatttcctaagtgtttatatttcatggcacgcatcacatggttcaagtatttaatatttgatctataaattaaattggtaattaaccttccctttgtctggctttgttttctcgtgcgtaaatatttatagggttcataataaatatcttattattataattattacttagctgtataactttagtttaattttccattgtgacaatttatagcttggcaagtaaaagcaaccataacatccagcatgatgcaaaaagttttaaaaagttcgaaattttagtgatttttattgttgggaattttcaggatgttacaatgtgtgttgatgcaggatgacaaagtggtttcttatgcttcacggcagttgcgtcctcatgaaggcaactacccaacgcatgatctggaattggccgcagttgttcatgctttaaagatttggcggcactatctcatcggtaaccgttgtgaggtatatacagatcacaaaagtctaaagtacatcttcactcaacctgatttgaatctcagacagcgaagatggttggagctgatcaaggattatgatatgggaatacattatcatcccggcaaggctaatgtggttgcagatgccttgagcaggaagagctactgcagcgttgcatgggtagagcaactatgttgtgaggttcaacgcgatttggaacatctgaaccttggtatagttgagcacggattcgtggttgccctagagacacagcccacaccggtgcgtgaaaacggtatggagtccggataagttacgcgcaacttatccggttcggttacgcgggcgccctgatcaagtgacctatctctatataaaccgagccgccgccttcacgcaacatacgcgaaatcaatctagggtttgcctcctactctatactgtgtcgtcgctcgtagactactccatcccgctcgccggcgtgcaccggcgatcgggagagcaggtcttcggaacctctgccttcgatgtcctgcaccgggagaaggcggcaataaggtttttggtaagcgcttcgcgcgactgctccctgttcgtccacgacggctcgtcttcctctccgctcacgtgctgcgcgcctttgtcgacgcccgaaaccgcgagttgccgagcaaccggtctttccgtcacctcggtacgtgttacgcatatttgatttgttcatgttttactgcttagtttacatgtgtagatctaatgatgcgttcaatctagtttacatctgcaatgtcatgatttatttatggaataaattaaatcattatgtgcttataatttcaacaatccaaaaaccttattataggcgctgtgattttactatggctggttttgccgatgcactgaggccggataaattcaccggtgtgcactttaaaagatggcagatcaaggtcactctgtggctgatagctatgaaatgcttctgggtgagtactggcaaacctgaaggaattcttactgctgatcagcagaagcaattcaaggaagccactactctctttgtgggatgcattcttagcgttcttggcgatcgtctggtcgaggtgtatatgcatatgaccgatgctaaggagttgtgggatacactgaatactaaattcagtgctactgatgctagcaatgatctgtatatcatggagcagtttcatgactacaagatggctaacaaccgttctgtagtcgaacaggctcatgagatacaaaccatggctaaggaactcgaactccttaagtgtgtcttacccgacaaatttgtggccgggtgcattattgcgaaactacctccatcatggagaagtttcggtactgcactcaaacacaagagacaggaacactccgttgaggggttgatagcgtctcttgatgttgaggagaaagctcgggaaaaagacgtcgcgtctaagggcgatggtgggcagtccagtgccaatgttgtgcacaaggcccagaacaagagcaaggggaaatacaaagctcaacagactaccaacttcaagaagcagaagaagaacaacaacaatcctaaccagcatgagaggacttgctttgtgtgtgggcaaccaggtcatctagctaggaagtgtccacagcgcaaggggatgaaggcacctgcagggcagacttctaagtctgctaatgtgatcattggcaacactggagatggaagcaggtatggtaatttacctattgttttttcagttaatcagtctactaattggtgggttgatactggggccaatgtacatgtttgtgctgacatctcattgttttcttcttatcaggtcgcacggggttccaccgtcctaatggggaatgggtcacatgtttctgttcatggtattggcatggtagatctgaagtttacttcgggaaagatcgtgcagctgaagaacgtgcaacatgtcccttctatcgacaggaatcttgttagtggctcctgtctgactagagacagatttaagttggtttttgagtctaataaagtagtcgtgtctaaacatggatattttattggcaaaggttatgagtggggaggcctgttccgcttttccctttctgatttctgtaataagtatgtgaaccatatttgtggcagtgtggatgatgaggctaatgtttggcactcacgtttatgtcatattaattttggcttgatgtctcggctttccagcatgtgtttaattcctaagttttccattgtcaaaggttctaagtgccatagttgtgtgcaatcgaagcaacctcgcaagcctcacaaggctgccgaggagagaaacttggcaccactagaactcctacattcagatctttgtgaaatgaatggggtattgacgaagggtggaaaacgatatttcatgatgttgattgatgatgctactagattttgctatgtgtacttgttgaaaacgaaagacgaggctctagactattttaaaatttataaggtagaagttgaaaatcaacttgatagaaagataaaaagacttaggtctgatcgtggtggagagttcttctcaaacgagtttgacttattctgtgaggaacatggcatcatacatgagaggactcctccctattctcccgagtctaatgggattgctgaaaggaagaaccgcacactgattgacttggtgaatgccatgttggacaccgcgggactacctaaggcatggtgaggggaagcattgttgacctcgaatcatgtgttaaatagagttcctaacagaaataaggacaaaacaccatatgagatatggattaggagaaaaccatcactttcttatttgcgcacatgggggtgcttggcgaaagtcaatgtaccaataacgaagaagcgcaaacttggacctaagactgtggactgtgtctttctgggatatgctcatcacagcattgcctatagatttttaatagttaaatccgaggtacctgacatgcatgttggtacaattatggagtctcgtgatgctaccttctttgagagctttttcccaatgaaggatacgcatagtagttcgagccaaccctctgaaataattcccagtttaatcacaccaccagaagaaactgaacatacacatgaacatgtcactgaggaggatgtcagtgaagctcctcgaaggagtaagagacaaaggacggctaagtcctttggtgatgatttcactgtgtacctcgtggatgacactcctaagtcaattttagaagcatatgcatctcctgatgcagactactggaaggaggctgtccgtagtgaaatggattccattatcgctaacgggacttgggaggtgacagagcgaccctatgggtgtaaacctgtggggtgcaagtgggtgttcaaaaataagcttaggcctgacggtactattgaaaagtacaatgctcggtttgttgctaagggctacactcaaaaagaaggcgaagatttctttgacacttactcacctgttgctagattgaccacaattcgtgtgctactttccctagcagcctcacatggtcttctcgttcatcaaatggacgttaagacaacttttcttaatggagagctggatgaggagatctatatggatcaacctgatgggtttgtagttaaaggtcaagaaggcaaagtgtgcaaattgttgaagtctttgtatggtctgaaacaagctcctaagcaatggcatgagaaatttgataaaacattgacatctgcaggctttgcagtcaatgaggcagataaatgtgtgtactatcgccatggtgggggtgagggagttattctgtgcttatatgttgatgacatactgatatttgggacaaaccttgaggtgataaatgaggttaaatcattcttgtctcaaaattttgatatgaaggatttgggagtagctgatgttatcttaaacattaagctaattagaggtgagaatgagattacactcttgcagtcccattatgtggagaagatcttgaatcgctttggctacattgatagtaagtcttctccaacaccttatgatcctagcttgttgcttcgcaagaacaagataattgctaggaatcaactggaatactcccaaatcattggctcgctgatgtacatggctagtgcaactaggcctgatatctcctttgctgtgagcaagttgagccggtttacctctaatctgggagatgatcactggcgtgcgcttgagcgagtaatgcgctatctgaaaggtactatggaattggggcttcactatacgggtatcctgcggtactggagggttatagtgattctaactggatctctgatgtggatgagatcaaagccactagtggatatgtcttcacactgggtggtggtgttgtttcgtggaggtcttgcaaacagaccattttgatgaggtcaaccatggaagcagaactgacggcattggatactgctactgttgaggcagaatggctgcgtgatctattaatggatctgcctattgttgaaaaaccggtgccgactatccttatgaactgtgacaatcaaacggtaattgtcaaagtgaatagttctaaggataatatgaaatcgtctagacatgtgaaaagacgattgaagtttgttaggaaattgagaaactccggagttataacgttggattacatccaaacagctagaaacctggaagatcccttcacgaagggactatcacgaaatgtgatagacaatgcatcgaaggagatgggtttgagacccatgtgagttatactatggtggtaacccagtctaggtgatcggagatcccgtgaattagaacctgggaagaacaaaccattagtaaactagagaagagtaccaatctataccctctctaagtgaagatgcatgtactctcgtgagctgcaaggcaggttggctatgccttaatgagttctgttggctttaattagcgaagatgctatcctgcagagcattcttgaaagaactcacctttgtgagcttgactgttggtcgcagtctatggagattttgggtaaatcttttaggaagcttactaaagacctaggagtatgacttatacgctccacccgaggggtagtctacagacggtctagtaccagataagactctgaatgaaacttgcttgcacaagacttgcaattcaaggcgtagtccattgttcaagttgtgagtaagtgtagcttggagttctagatagatgttcaaccttaatcggtctccatcgaaccgctggtatataaacagtacattggaaaaaggcaaatctcagtgggattttgagatttggtggaatattgttggaattaatagatgggctaaggcccattcgaagattagttcttttgaaaatcacaaaagctcacctcatgggatggcatgcatgtggagtttagtaccaccttgcttattctaggagagggggacctccttaaaagggaggatgccctcctagccacttaaagtatgtgcggtggagagaagaggggaaacacacatgcgtgctcgctcgcctcgcctggcagggcagggcggcggcgcgcgtgcacgacgtacgcgtcgaatggtccacaaaattgcctcctcacccttgcgcagatgcagcctccttttgtagttttgttttgttgcaggaaattcggatttgttttgttttggaaacattccgaaaaatctggtgcgtgtaaacggcgtggagtccggataagttacgtacaacttatccggttcggttacgcgggcgccctgatcaagcgacctatctctatataaaccgagccaccgccttcgcgcaacatacgcgaaatcaatatagggtttgcctcctactctgtactgcgccgtcactcgtagactactccatcccgctcgccggcgtgcaccggcgatcgggagagcaggtctccggaacctctgccttcgacatcctgcaccaggagaaggcggcaataaggtttttgggaagcgcttcgcgcgactgctccctgttcgtccacgaggctcgtcttcctctccgctcgcgtgctgcgcgccttcgtcgacgcccgaaaccgcgagttgccgagcaaccggtctttccgtcacctcggtacgtgttcgacatgttgtgcatatttgatctgttcatgttttactgcttagtttatatgtgtagatctaatgatgcgttcaatctagtttacatctgcaatgtcataatttatttatggaataaattaaatcattagataccgtaaatctattgttgtaatggcgcaaccatccaccacatcgaaacgtttctttataggtattccatgcctggtgattgggtatcagcttgataccgacgggtatcagattttgtacataggtattagtcatagacatatataatatattcataggtattagacctagtactcataatatatcatccctttcggttctaacaggatgcttgtcccctagctagcagccacccgtttgttcatctgattaattagatggatctataaattttgtttcatttgttttgtatgaggtaggaatactagatagccacccatgtgagaaattaaattaatctagcaagataaaaaaaatatggcctgcagcttgggattaattgaggagctggtgagcattactcggcaagcataagacgcacatcataacttatgtacacacttaaagaactttagaaagagacgtcgggaatcttttggcacttgcagctactcaataatctccaagtcatccaaatacaatttcttacttcagattttaagaccacaagtagatatagaatgtagaaatgaaccatatagtcggaagctaaagtttcccaccttgtaaaaattatcaccagctagatgcctaattaagtacccccaagcaatttcttagaatcttcaggttctcaatctatacagagtacatcagtacaactgtcttagtctaacttgataaggaactttgtttaagacaggaggccactttgtttacagtaaatgttttcactaaaaataggcggctttgagatggccaatagagtaggtgcattgtgaataataaaatgtcatagtgatgcatgtatatgcgtaattcgtcgtgatcacatggagtcataggggcgcagctaaagggggtgccggagagggccaacacccccctatccgacccctttcctgtgctactaactagcgtattagcaagttaattagtccattatcaataaacatgatatagaaaaataattaataagaaagagacggagagtcaacgcaaatcaactcctcgccttcattgcttcggcttcacgtgtatctccattctcccattgcgtttcgttgtcgatcatggtgtctcaagtcaaattgtcaaacatccaatgatacaactaaagagctaaattcaagttattttatggcagaacacatgatgttttattttattatcggcaatgcttactttgacttataacttatttgctctatccacaccccctaaccataaatcctagcttcgccctggagtcatggacagcatccgtagaactagcaaagatatagggactttgtgtttttgacttttaatttgtcttccttaatttgttctttgtccgtggagaaacgattagttaaagaaattaacaaatcaaacaaagaagaataattacatacgaccgaggaagaaacaccgagctctataaatggcagcccatctcgttgcttcgccttccagagcaattcacgtacagacgtttgcacggatcctgttcgatcgagagctgaccaggcgcgtgcatgggcagtgcgagcactccggccgccagcgacggcgagattaagctgccgccgccgcacgccgtgtgcatgccgttcccggcgcaggggcacgtcacgccgatgatgaagctggccaagatcctccacggcaggggcttccacgtcaccttcgtccacaccgagtacaaccaccgccgccttcgctgcgtccacggcgccgacgccctcgcggtcgcgggcctcccggggttccgcttcgccaccatcccggacggcctcccgccgtgcgacgccgacgccacgcaggacgcggcggccatctgccagtccaccatgaccacctgcctgccccacttcaagagcctcctcgccggcctcaaccgctcgcccggcgtcccgccggtcacctgcgtggtgacggacgccggcctcaccttcggcgtcgacgccgcggaggatctcggcgtgccgtgcgcgctgctgtggacggccagcgcctgcggctctctcggctaccgccattaccgcctcttcatcgacaagggacttgtcccgctcaaaggtatcgtctccttcctacgtacacccgttcttcgttcatggcgatccagttgcatgacacgccggtgatcagatgcatagcagctgacgaacgggttcctggacacgccggtggactgggcattcgggatgagcaagcacgcgcggatcggcgacttcccgagcttcctccgcacgacggaccgcgacgacgccatgctcacctacgtgctccacgagacggaccacatggcggacgcggacgccatcatctacaacaccttcgacgagctggagcagccggcgctcgacgccctgcgcgccacactccagccggcggccgtctacaccgtcggcccgctcaacctgctcgccgagagcctcgcgccgtcgagcggcggcggcgacccgctcgacgcgctgggctccaacctctggagagaggacgacgcctgcctcggctggctcgacggcagggcgccccggtccgtggtgtacgtgaactacgggagcatcgccgtgatgagcaaccagcagctggtggagttcgcgtgggggctcgccggcagcggctacgccttcctgtgggtgatcaggccagacctggtgaccggcaacgacgacgccgccgccgccgccgccgccgctctgccgccggagttcatggaggcgacgaggggcaggggcctcctggcgagctggtgcccgcaggaggcggtgctgcggcacgaggcggtggcgctgttcctgacgcacagcgggtggaactcgacgctggagagcctgtccggcggggtgccgatgctgtcgtggccgttcttcgccgagcagccgaccaactccctgtacaagcgcgcggagtggggcgtcgcgatggacgtcggcggcggcggcgacgtgcggcgggaggcggtggaggcgaggatacgggaggcgatgggaggggagaaggggagagcgatgaggaagagggcagcggagtggagtgagagcgccgcgcgagcaacgcggctcggtgggagctcgtttggcaacctggactcgctgatcaaagatgtattgctctctggcaggaggagttagaaacgaaggatggatgcactgcaaataaagttcagaaattgaacaccttgaaatatagggattatcaaccatagcattatttggtaaaattgataattatatagctatatttagtttgttaccgaatattggtaatatgtatagaatttggcaacattattaaaccaattctatcaaaattttggcaattgacaacattgctaaaattttggcattaccaaattttggtaaggttcattttggcagcaatctgcacaggcccataaatataaccatagtgtatactagcgaaaattgctatcaacacataatgcttttacgaaatcccggaatgtgcatcgatatagtataatactttctttgttttatattataagtcactttgttttttttaaaatattattttttaagtttaattaaatttatagagaaatatagcaatattttcaacacaaaataaacatattgtcaaaataaattaaatgttagttttaatgagattaatttgatgttgtagatattattaattttttatgtaacttaatcaaattttaagaaagttaactaagaaaaaaaattaaaaaccagtgtataataagaaacggaaggcggaaaagacaaacatcaagaatgactgaattacatatgggccatctgttgttcaaataagagcaagaataatagtgagctatgagtaaaatatatgcttatgtggaagagagggataaagaaaagtagggagtgtgagctcttatataagagttagctcaacataagctccaataaatatatactacctccgtttcaaaatgtttgacaccgttgactttttagcacatgtttgaccgttcgtcttattcaaaaacttttgtgagatatgtaaaattatatgcctacataaaaatatatttaacaatgaatcaaatgataggaaaataattaataattacttaaattttttgaataagacgaacggtcaaacatgtgataaaaagtcaacggcgtcaaatatttcgaaacggagggagtattaaatttatagtgagagaaagagagggtgacaaaaataaaactaccttatagctaacctattatacatgttaggtttaatattaacttatagtagtaaatagttatagtaggaactaaacttgctctaaactctgggtgatccttcagataatagttcggatcgggcactcgatccaacccgaaagatcggacaccctccccgacactactgtcagttgtgcgtggcatgaccgtctcatatggacttagtgcctgcttgctgcagtaacaacacatgatggacaatttcggttttttgccaacttttatgtccaatattaattttacctctatttttaggggttttatttttgcctccagtttttaatcgaaagagacgtttacccctagtttggacggaagttagtgggagggtttataacagtaaaaaattagaaataaaagaaacaaagattttttgaatttgtaagatcacacactactatattttgatgaaaaaattgaatgttatttcatcacatataaaaaattgttttatcactaggtcaaatgtttttcagagaaatgaaatattactcaatactgactgcaacacttacgaccgctctataaaacattaaataccaacaaatgaaacattgaaaataatcatatgagagatacattatatttacaacaaaaattgatatttttgaaacattttatgtcatgtccagaacataagcaatcttataaaccgatttcagggtccgaacccaggcgtcccattgggccacgtggcatcgcgtgttgcgctcactcggggattctcggctggtgaacgcaccacgtgtttgcacccctctaatagccgttagatgatatatcaacggtaaaaaatcatctggcggacctaaatgtaaattgcaggtttgagagggtttttttaaaaaatgtgtgatctaatcttgaagaatctgggttattggagaaaaaaatcaaaaaaaaaatcgcaataaaaatctcctacccatcgtgtcgccgccctgcctcgagccctcgatccacatcgccggtgcctgcttcgggcgatgaggatgaggggtgatggcggctcgatctacgcggcctgctccgcctggacatgcgccgcctaagggggatgcgagaggtggcgccgatgccggcggagggagatggaagccccttgcgcgcgcctcctcgatgtgctcgagccgacgcctctaagcttcaggggatgtggatggcgagagagagagagagagagagagggaggaggagaggaagctgagctcggcgatgtggatgttgaggctgatggccagccacggatggagcagtcgagcggtaggtttgctcgtcggtgggatttgggccttgccctcaataccgtcgtcgccgccatcctgtgccaccggaggccgctcccgctgggccctgtgcccgccacgcatgcactcctgatggtccccgtctctgcagccatcttcgctggcatactgctctccgccctcgcatggttatcgacttgtggatgtgggaaacgagtggtcgtggtctcgtgggaaacgctgctctttattcctactccagtacatgcactagtagtagtagtactcggctggcctgcgttacttttcctttttttttatttataactgttcgctgcaaggctgcaaacatagatgaatatcatatgcccctatataacttaatatgccaaagctaaagctaaagttaaaattttcaaacttaattttataattaattttaagatacttttaatatagtttctattttatattagctttcaagtcactaacaatatatatatatgtatatatatatatatatatatgtatatatatatatatatgtatatgtatatatatatatgtatatgtatatatatatatatgtatatatatatatatatattataaattgatttttatttttaaataagacgttttggttaattaggggattatggacaagcgatgatgaccttaatctgtgttcaacagtgtgagaatgtgaaaaaaattcttgtttttcgcacgctctaccggaaccaataaatgatgtgtttttttcaaaagaaaaatttataggaaatttactttaaaaaccatattaattctttttaggtttaaaaaataattaatacttattaatcatatgctaatgtcttaattttgtgtatcttatcattgttctcttttctcaattactcaaacacgctctaagtggtagttgttttgggataaattttaaacccagaagagcttttttttttaaaaaaaaaggatggagtaaattagaatgcaaagtgggctcacagggtgtttgtaattaattttctcatctatgctttttacggtaaaaaaaaaatgataaaccctgtgttttttgtaaataaaaaaagtaaatttcacttgggacactttttattgctgatgtttcactttggctcacccccaaccaattttttcacttttgactgggtattttcacctttgtggcattttataacatcctcagttgttttatccatatacatctaaattgtcgtatgtcaaagaaatagtctacatacaactaagaaagtttattaatgaataagagtaggagtactcgaggtcattcatatgcatgaggagagagtaacaaaggcaagattactcgatccaaaataaaaacgttgcgtaaaaggtgatcaaaagaaaaacatccgcaataaggttgtccaaagtaaaatttactctaaaaaatttctagaaaattatcaaaaaacatattaatctatgtttcaggtttaaaataattattaatcattaatcttgtgctattgacttatcttattttgttcatcttatcattcttcccttttctccttcactcaaacacaccctaataagttagttattttgggacaaattttaaacccaaatgagcgattatttggggatggagggagtaaattagaatgtgaagtggcccatagggcgtctatgtaattaattttctcatctatataataaaataagaggacttaactagaagaggtagggacaggggcgaagccaggataaatgatcgccggggtcattacaaatcagggtatatgttttcaaccaaaacggattgaaaacaacgcaattttgatgttccgactcgagaaaaaagtaaattctgagtgaaatttcgaatagttttcaaaaattcaaatttggaatggtaaaattgaaccaaaataataaaaaatataaattttggtaaaaaaaagtcatatcgctatgtttggaatccaatactaaatcgaagaggtgagccctcatacaatctggttgtgtttggacctaacaattggttctgaacccttctgtcccaacacgcaaaatggagcaaggattaacacgtaattaattaagtattagcttataaaaacttgaaagacaatagattaatttggtttttaaagcaattttctatagaaattattttgctagggaatttgagacgaagttgtgggccattggccttatgcatagtctcaaatctcaaaaactcaaatgtatatccatattcagctgacgtatatataatcataagtggtagctaattttctatttgtgctgctgcagtattgtttataattatcaattgggatttaacgtagcaatcaacaattaatgtcactggggtctaatattttttttcaccggggtcatagctggtaaagtaaagaggacacgagaggttaaaagaaaatcatcggggtcaactgaccctggtaaataactgtagcttcacccctgggtagggagctgaaatacaaaaccaaccatgggtacaataaggttatcatgcatcttgaaacactaccattgtgaatacctcaaagtgcacgatctacacaagaatttgatgaaaaattaagctaattcctataaagtctagcaaaatattagcattaattaccctcaacaattatataagccatatagagagagcacaccaaccagcatgtttattttcccgaagagctggctcttgccttttccaagaattgttaattatatcgaggacttgctaaatagtattgcacgtgaagcgtttacataattggccaaataaagcattctgcatgctagcacattaatatattctacttgttggcccattatgcgacaaagtcttgtctcttttgagatgttattttgagcttagattttttttgccagttttccatttatctaagtgtaatatgtttgttgagaaataaacatttccagattcttttcccaaaaagaaatatttcatattttttcaaaatagaaatgtatcaaataccactgattattgtcgctcggttcatttttacaccatctcatatatatctaagaaatcaaactaattctaaataactctactacatttatatattctatatcctaaacgaaaagtataaatattcacatggtacttttaagtggtgcgccaaaggcgcacccattttctagtatttacaaattaccgagtgaaacatagtacaaatactacctggaacatttataaaagcacgtgcaacatttagaaatccattaaaagctaaactttttttacggaatataatcatgtgtggtcttattgtaaagatttagttgtaataaatttaatggtgcaatcgaatcatagatcaaagaagtattttaaaagaaaaaatagttttaaatttgctaaaggactttaaccaacctaacatacattatttatccttgcaatacagtatagctgctttgcttgggaagctatgtaactgcagcctctgcatgcattatacgttagggagagcgctcgatttcaaacgcgaaaaatcgggcgtccgatccatagttgtgtcctaatctttttgtaattttcgcttaggactaatcaaacttcttgcactttacaccccttgtcccctaaaccaaatcaaggaagaaaggtagccgaaacggtaaaccactcatgtaattcacaattccttggcccatctatatatttaacatgtcatcttttcgtgacagccgcgcacctccacaaatgaagaggcccaatacatctaccgcatggccggcctggtcaaactggatttccttacggaataagtttactttgattcccttaattagtggtcgaatatgaatcgtacctctaaactataataccggatatcttgaccccttaactctttaaaccggcgcaatttgactccctcggtggttttgctgacatggcgtatacgtggcggcattgactcgatcttcgctccacgtgaagctgacttgacgcttacgtgtacaaaaataaaaaaatatgagcgggacccgtttgccataaaaaaaggacccactgagatgtgggtccatatgtcatcctcttcccttcattcctctcctctctctcccttatctctctggatcggatcggcgggcgaggcggccgcaggcgggcgctgcgacgacgacgtgtgggcgagggccaaagcggcggcggcctcggcccgcacgcccgggcctacaccacctccaagcataccatcgtgatgccgcctgcaagctcggcgcccacagtatccgcggccgtctcctccgccggcgagccaccgatggtgaaggagtggctccgcttgctgggccacctcgttaccggatgctccccgcgccagcgctgcttgggcaaactacgtggtcgcgctgttgatgcaggtcaaggccatgttctcgtagacctcctggccgccgccgccggtgacgcgtgcgacagggggcgccgcgtcgatgagcagcgagcggcacattacgtcggagatcgaggagtagcgccgcagcgacggcagtggggcggcgcgaccatgcgcttgcggtggcgatcgatcccctcgtcgattaggataatgagaagctaatacacaaagccatttttatttctttcagcttggttattggcagcaatcgatttggttggttgccttgttgatcaatcggagaaggaggtgaaggtcgccggcgtatcgctatctttcctatttttctcatcacggccctacacgggctcgacggcgacgccatccgccgcgggcgacgtcaccgacggtgaccatgaactgtgtcgcatcggggttgtccgccaccacgtggctgaattgaaacctaacgacgaagccgccggacacgaatgcggtgaccttgacgagcagcacgagctcactctccttctccccctccggcatcggcctctcctcgagtctcctctccacacgggcagtgttatcatcgtcgtactgccaccgccgccgccgatccggtccatgctcgctccgtacctctaccccccactgccgtgagccaccgccgtcgtccccttagtcctcccattaccgtgagcctccgcggccgagccgccgcccctggttctgctgcgcccccatgccgccgaccgctgctgccaacaaaggaagatagagtataggaggggagtcgctgacaggtgggtcccactttattttttaaaatttatttgatgactgggatgccacgtaggcaccacgtcagcgaatccaccctccaaaaccgtcgagggagtcaaattgcaccgattttaagagttagggggtcaagatatccggttttgtggtttaggatcacggattagatttcgatcacttttgagggtcataaagtgaacttattcctttccttatagatgaccaaatgggccaccgacccagctcagctcgggcacgaccgagttcgggcaagagattggtcaggccaccagcacgactcgacctacacaccgggcagggccgtaacgtgcccgtccacgagctgcaccaatggcctaggcacgacccaataaaactcgggccgtgtctagccggccagaaggcacaaaagtccatcgtgctcctcagaataattctattttaccctctcatttcgttgggccatgtcttaaatgattagaataagtctattttgcatcccatgcactttgggccatacatttgtagctgaaataagtctatcttgcatctctaaatttcatttattatcggattgtgctatgccgggccggcccatcgtaccgaggcagaggcccagacatagcccaatggtcaggccaggccagcattggcccgacaccaatcgtgtgtgtgctgtgattggaccagaccaaaacctcgtgccatgggccgggtcgtgggtcttttggccatcgatctattcccaccggtcagtcggccaccactgatcgaaaacacgagaaaacttagcttggccccgcgcttggctggtcctcgaccacgagctgtcaccttctctcctgacataacaagaccacgttgatggcgctgccaatccgcgcgccatgcatgcatttgtcacttgctcctgcgtgccaagcgtgtgacaatttttttattcggtgataacgccatctcacgatgatccacattgagcggcagcttgaaattaaatggtcgatcgatcgcggagtatcaacgggaaaatgatggcttgttagtcgatcgcggagtagtacgtcactccgccaggaaaatagtgtatcctactagtcatcatgtgacgggctcagtcaggttgaactgatccaatgaccaataatgggcaaacttgtagagacagggtcacagggatacctacgtgtttaggcatggggctgagaggcttacgttcttacctgaaaacgaacagctaagatgggaagaacaacccgcgccgcggcggcccggcgcgctttctttacccttttcgttcggtatttttggtcttcgcattccaagtatctagaaaaaaggcacaactttacgagggaagcacaccaacacagcaacactaacactaaggttcgttcttttctgataaataagatgcatattctacccctgattttcgttagcatgcttttttaatactattaaacgatatatttcgtgtgaactttctatatataaattgctctaaaatattagataaattcacattttaagtttataataattaaaactcagttaattatacgttaatgttttttattatgccataacttcgctttcattcaattaggttgtgctttgagatacacttgatagtgtggtggcaagggatgcgtggtttcaactctgattttccgtgttcaatttccaacgcactcacaatttcttcttataaaaatgtttggagggacgtttctcccttcaaatctccttttttttaattaggttttgcttttttatgggttattagcacataattaattaattattggttcaattttttttagattaatatgttttaaagcaactttttctatataaaactttttttaaaaaatgcattgtttagcagtttaggaaaacgtgtgcacgaaaaacgagaaagtgaaggttagaaacctcaacataagaactcggccttagatactaacaccgcctaacatagaacaactcatggaatagatatgaacgaagcatttagaacggatctagctcttttttttcgcattgggatctctaggttgaagaataaggtggtttttggatccagagactaaatttgtgttcttgtcacattggatgtttggacactaattagaagtattaaacgtagactaataataaaactaactgcataaatgagagctaattcgcgaggcaaattttttaagcctaattaatccataattagcacatgtttattgtagcatcatataggctaatcatggattaattaggctcaatagattcgtctcgcgaattagtccaggattatggaatgggttttgtcattagtctacgtttaatatttctaattagtatctaaacatcggatgtgatagggactaaattttagtctctggatccaaacagtcactaaggcctgttgcctgctctagtctgattcaactttcaacccaaaaagaatagaacagtaaaataaaatttaagtacccaagccaaatcccagaagaccgggacaatcagggattgtatggtttgaagctgattttggccctgccaatattttgctagtgccaaaatcttggcactactaaatttagtagtatagaatttatgctaatgtgcgtaaaaattgattttaaaccaaatattaagacagtacttttgaagttatcaaattttcagtaggactaaaatcagcttcaattcaaacatggcctcaatccatccccgaaaagatgggagatgcatgtaacttagactgtaaattcacatttttcgtatatgaagcattattaaatataagatgcgtaacttggagtactatacattccattatcttaaaaaaaaacacacacaacattgtgtgtttccataggcaaaataataattttcttctctacctgcattaatttggttttgttttaagtgagacgagatgtcacaagtatacttcttgccgttcaaacttttgagactattgtgaacaatgacaatgtccttgtgcaatctatatcggtcatgacgtcgtgtgtgtcgcattgtacatgattatttatgtttcaagaaaattttagacgttagtcattattcaagtcagagttctctaggccaatgatgtgagagaacgacaagctgggaatcaaataattacgtttgctgaagtattgcattaaccaggctaaaatttgtcttagtcgttaacgatgagaccccggccaagctggagtataccaaccaacactagaataacagtacacgctagtagtatatatgtgcagtgcctgcaatcggagaggctgcatctcgtacaccgctgcatctcgtttccaccagccgatcgatcgacgaacgacgacgtacgacgacatggtcgccgccgacgagatcaagccgcacgcggtgtgcctgccgttcccggcgcaggggcacgtcacgccgatgatgaagctggccaaggtgctccactgcaggggcttccacgtcacgttcgtcaacaccgagtacaaccaccgccgcctcatccgctcccgcggcgccgccgccgtggccggggtcccggggttccgcttcgccaccatccccgacggcctcccgccgtccgacgccgacgccacgcaggacccggcgtcgatctgctactccaccatgaccacctgcctcccgcacttcacgaagctgctcgtcgacctcgacggcagccgcgcggccgggatcccgcccgtgacgtgcgtcgtggcggacggcgtcatgagcttcgccgtcgacgccgccaaggagctcggcgtgccgtgcgcgctgttctggacggccagcgcctgcggctacatgggctaccgccaccaccggttcttcctggacgagggcctctcgcctctcaaaggtattcgaccatatgacaccaccacatgcatcgtcttgttaaagttaaacaccgtaacgaggaacgaagtggttcgcacgcatgcatgacgcgcgttctgtggtgtggtgtggtgttcgacgtacgtgaagatgaagagcagctgacgaacgggttcctggacacggtggcgcggccggcgcgcgggatgagcaagcacatgcgctaccgggactacccgagcttcatctggacgacggaccgcggcgacatcctgctcaacttcctgctccacgaggtggagcgcgcggaccgcgcggacgccgtgatcctcaacacgttcgacgagctggagcagcaggcgctcgacgccatgcgcgccatcctcccgccagtctacaccatcggcccgctcggcagcctcgccgaccgcgtcgtcgcccccgacgccccggccgccgccatccgccccagcctctggaaggaggacaccgcctgcctggcgtggctcgacggcagggagccccggtccgtggtgttcgtcaactacgggagcatcaccaccatgtccaacgacgagcttgtcgaattcgcgtgggggctcgccaactgcggccacggcttcctgtggatcgtccgccccgacctcgtcaggggcgacgccgccgtgctgccgcgggagttcctggaggcggtggcggggaggggcctcctggcgagctggtgcgagcaggaggccgtgctgcggcacggggcggtgggcgcgttcctgacgcactgcggttggaactcgacgatggagagcctcagcgccggggtgccgatgctgtgctggcccttcttcgccgagcagcagaccaacgcgcgctactcgtgcgccgagtggggcgtcgggatggaggtgggcggcggcgtgcggcgggaggcggtggaggcgacgatcagggaggccatgggaggggagaaggggaaggagatgaggcggagggcggcggagtggaaggagctcggtgcgagggcgacgcagcctggcgggaggtcgttggtcaacctggacaatctgatcaaggaagtcttgctcccaagtaaaaaatgcggctagatagagatggcctgcttggctgctagctgctggggtggaaaagaattactactgtgtttttacttatggattattcctgctagaataatattcacctgcttggaagcaggtgattcccgggaagtaggattgagttaattatttggggcgtccaggactccaggattactatttactactactcgatctccttggttactgaaattactgtcatattttttctttgtgtccattaaattcctgtcatctagttttcttatttttttcagagaagacgtagctaataatgtattgccaattcccagcaatattacaatttttagagtgcaatggaatgcacctacttaacacatatagaatgcatttgcaccctttagtggtttggctctatcggcattgagaggtatatggctttgtcgtaggtctaatgatgatcggtctcgcagcgatagttggtttggtgttagtttttctccttggtttgtgtgtggtggtgccgttcatttgtggttgacttgtgggtgagctggataagtttttcttttccttttgtattttcttctactacatcaatagtaacatcgtacggttttggtgcagttcattactagaatactcacacatacatatctcctacatgcacatagaaattgttagaggcttacagccaagtatgggcacgcttgcatatccaccgcacaagcgcatgtgtgcatgcttccacgatagtgggcaacggtgccagccagccagacataccaaattctaacaattcgactcttttgtaaaaataaatcgtgccaaaaatatattttagaataaaacatgatcttagtgctattcccaataaatatgcagcccaaaatctcagcgctagatgttttgacgctaacaccccttccgcattagcgccctatgcgagctagaggaccagcatggcaggaggttcccgccacttaattacctcccaacctcccacgtcaatggacatggtgttgacgtagatgacttgaccaaaaactctagagcttgacaaggacgttgtggcactggagtcgatagagctcaatgaggatgtcagtggtatggaagagcatggagtcagtagcaacatgtgagtccagctgttgtaacttgaagcgatacgacactagaggatccggacaccacatcctgatcgagcttctggccaagtctcctacctcaacaccaagcccattggtgctcaggttggggtcgaaggtcagtgccaaatcttttgatgttgaccatgccacgtcggccctcttgctcagttagcgcaccacgatggtataagtgtcaactcctgacaccagcattgatatgttggatttcaacaccattagacttagcattgaaattatagcctattttttaaataagtttttggcgctatatgttcatagaaatgtttttgtgctcctactgaacatggtttgtcatctagctagttgctcatatagcccgtcacgctcacacaatagcaatagcatacttcgccaccgcggctgactcaccgcactcactcgattgttgggataaaacatttggcaatattatttttgtgataaattaattaacgaaaacttcgctactctctctctgtttcaggttataaaacattttgattttggtcaaagtcaaattacttcaagtttaacttaaatttatagataaatatagtatatttataataccaaattagttttattaaatcaataattgaatatattttcataatatatttatgttgggttgaaaatgttattgtttttttctacaaacttagttaaacttaaagcaatttgactttaaccaaagtcaaaaacgtattataacctagaacggaggtagtatttctttaccttaaaaaataaatctttggctgctaacaagggtaacaagtgccattgatatcctatcacgaatgcatcagattctatcagcgctgcctcgtaccctcagtgcactatcagatccatcacggtgagaaaacggagatgataactacactagccagcaaaagcagacaaggcgacaattccacaatccctttcgtttccattccacaaacatgcaggagatcccgcggacgcaacgaactcggcaacaaatttccagccacgcgacaggcacaaaccaatcagagtctgtcagctcgtcgatcgatcgtcgttgatcgattggaatttgtacatcccaacctttccactttcttcccatcttgtttgtccttgacgagtttgttccttgtcattttttttccctcctgcatccagaatgaagcttcaaagtctcttcttgctgtcggtatcgagttatggatcctaccagatctggacgtggcatggcatacttttactgtctgtgtctttggcatcttgtatgtgtatgatgcatatactataatatgaatggttgatgcgtgtgcatgcttcggcgagagtctcacgatcgagtagtaccacgtacttcctccgtttcacaccgtttcacagtataagtcattatagcatttttcacattcatactgatgctaatgaatctaaataaatatatatgtctagatttattagcatcaatataaatgtggaaaatgctaaaatgacttacattgtgaaacggtggtagtattaaacaagccaagaacactgagctggtagagatgtgtggagtgatgaatcgctgtctgcatggcgctgtcgtggaccatgcctcgtgcttctcgtgccgttggttggacccctcattcaagtatggtgtccattccgttctcaaaaaatgctatatatattatcgtctaaccttaatcaggtatgtttaagatggaggtggtacatcagacacatttcagagaaaaaaaatcggataaatttctagccttatgatttactccctccgtttcgttttatttgacaccgttaaccttttagcacatgtttgaccgtttgtcttattcagaaacttttgtgaaatatgtaaaactatatgtatgcataaaagtatatttaacaatgaatcaaatgataggaaaagaattaataattatttaaattttttaaataaaacaagtggtcaaacatgtgctaaaaagtcaacggtgtcaaataaaacgaaacggagggagtacttccctatttgtgctcccgcaaacaccaacaagattatggccccattataatctgcatgtaacacaacataatcaggggtgaagcggataaatgattgatggggtcagtagtaactaatggtgctagaaaaaggctgtgtttagatcaaagtttggatccaaacttcagtccttttccatcacatcaacctgtcatacacacacaacttttcagtcacatcatctctaatttcaaccaaaatccaaactttacgctgaactaaacacagccaaagaatgggatgtacaaccagtgtttgatgcactatcttttctggaattgcctattaagtaatcaatttattactgaacatgaatatatgcgtatcgtcctagtgttatccacgttaaagaacctcgcagctcgactgctcgtgccctcggcagcttggccatcgccaatcgccactgccatccgccgatccttgcctgcgttgctctggctagatgtgcgactcaaaaaaaaccctgtgttttttggttgaggttggaactaacctctcgcgcacacaaaacagactaacttattagcgcatgattaattaagtattacctttttttttaaaaaaaatgaattaatatgattttttaaaacaacttttatattgattttgttttcaaaacatgcatcatttaacactgtaaaaaagcgtacgcaccaaaaatgagagcgatgagttgggaaagtgaaaaaaaactcaaaagtctgagactcaaccatgaccatgggtgaaaagccagaacaggcaaagaaaaagaatgtgccgtgtagcgtgtgaggctaggtactcggaggaatacattgtatgcaagtgcttgctaattttgtaggagtatttgctaatgtctctcctagttgattattgggctttaacgaatcaatatactccctccatactcgtaaagaaagtcatttaggataatatttaagtcaaaccttggaaatataaatcatgaataactcttaagttcttaagttgttgagtttgaaaatgtaaaatttgtatgaatagatttgtcttgaaaaatattttcataaaagtatacatatatcacttttcaataaatatttttatagaaacaagaagtcaaagttgtgatttgaagaccgtgtcgctgtccaaaacgacttcctttacgagtacggagggagtatatcaccgaacaccggggtcatgttgtcttcttaaacggggtcatagcctgtgaaatagagagcggtaaaggagtgagcaggaaatcgtcaaggtcgactgaccccgatgacttgttgtaccttcgcccatgcacataatccctaccggttcatttaaaatcggcacctataaccctattcccacattccgtacgatgaaaaaaaaaactagcacttttgagcactataggtatcggttctaaagaaaaacatgtaccagttttttaaaagaacatgcttttctttagaaccgaaacctataataggtgcccataccaaaccgaaccgaactcagccttatccttatcctctccacacaaccgcctcctcctcctcctcctcctcctcctctctctctctctctcactgcctacctcgccgtcctccttcctcctccctttctcctccttatctggcggtgccctccccctctctctccaagcaccgatggagatctggaggtggcacagaggccggtcactgcggatgacatggcgacggccctaacccgagggctcttccaccttctcctcctccagcggggcgcggcgaggtagtagccagtgctggtgaggtggcggcagcggagggcgacgcagcgaggcggtggcggcgatggtggtagttgagaaggctcgtcggccctctccccctctctcccgggggccctctctcatcttctctgccgccatgctgccatccccccttcttctcctccagatctgaggcgggatagcctggatcttgctggccccccttcttctcctccagcgtggcgcagcggtggagaaggctggcaccggcgaggtggcagccgacgcgggcgagggtgctggttgtgggttaagaaccggcacctataatctctataggtgtcagtttcagaaccggcacctttgtccgggagtataggtgtcggctgggaaactggcacctatagccggtttccaaccggcacatattagagtttgtttactagtgtaagttatagggaagaggggactatttcctcatttactatgagcacgatttccgaagtgctaaggtgtgcattcttttacaaaaactttatataccaaagtttctttttaaaacaaaataaattaatttttcaagtttataatagtcaatactcaattaatagttaacaaataagccatctagtatcgcgtgcggctgttcagctcatgccaaggacttgttttggaccctattctctcacagagaatcatagcaagaggtgagatagtgtcgacgcatttattcccagttatatatttatctagatattcattatttcctacaatgattgatatatggctgttttgtattccagcaccataatatgcacacattactaggattgttctctacgaagagcatcgttatgaggcacaccacctttccaaagtgattcttcattccaaataattagaggagtattctcacattatgagaacttttatgttctgactaaggcccacggatcatgttcaataacatgatcaattgccataaattcggatacgatgatattcctagatatcaacatcttatcacaattagaaccattactttgtttaatagccaatctagttgtcccctttacgaaactccgtgcccaagcaacgacgagtatgaactaaatccgcaagtttattttttaatgtaattttatattatgacttataagtttatttatctaagtttaatttttcatgtaattttgtatcatgagttataagtatatttccttgtaattttataatattttagttagaatactttatggtttaaccttttatctaaagtagaggatttattttaataactaggagaggattgattaataccgttatagctagtagttagctctactattcaacttaatctaagtgcaccctttccatgtgccgacttgctagcttacgggcttatgacatgttcgtgagagtaagtactatagcaagctacaagctgcttataaacacatgtggaggagagagggacaggaaaaaaaagagtgttggttcttatataagagctagcttttcacatgctgcaagataactgcattgaatagataaataagagaaaaggagaagagaagaagattgagacaaccttctagcaatctagctagtctattatacatattcgctctaaaatgagcttagtgtagctagtagttaactctactattaaacttactttgagtagtagcctcaaccatgtggataagtagtgaaggaagtactcactatgggcctaatataggccttgtaaactgtttgggttcctataatttggggtgggttggattacacccacactaccgctgattccatcggccatggaggggagctccatttcttttttttattattattaaacttagcctccagcttgtagccataagcaaaaatttgaattttgaaacttaatttgaagttgattttaggattttatttcatcgttggttatattccaatgttcgctcctaaattgctaagaacacgtatataaaagttttaccttaaaattatgttttagccattaataaggtatttcacttataataattgtaaacgaaacgatgagcctgtagatgtttcttagggcaagtgcaatagggttattcggtccgactattagactgcttagattagtaaatgcttatatgaaggtgagaggcaacataggagagaaaaaaaaatcgttgactatatagtcgccagtcttgcatgggcggctaggcgccaaggctgcagcagcctgctttaggctatattcggcaaaacaggttgggaaccaatcctctgcgcatgtaaaatgaagcaacttaattagttaagtattagcttaaaaaaacttaaaataaattaatatgtttttaaagcaaccttcatatataattttttttgtgaaaaattacaaagtttagcagttcggaaaacatgcgcacggaaatcaagaggtaaaagttgcaaagatgaagaaaagaacacaaccttagagcaaggttaaatgaagagatatttcacatttgattttttccaaataagttgttcctatttgtagtctttatgtatttaagatttaaatgaagagataaattgaatgtttgatgataacccaagaagtcatttaaatactcattggttgcatatttgcattcactttttgattttgtaacatccaagatgatttaatttctccttggtcttggtgataaaagtaatatgtgtaacttttgtagatggagggagtagtagtgtaggcaattggcgttaatttcatccgacttagttataactctctttgcaccttgtgaatacaataagggcctgtttggcacagttccagctccacctctcctgaagctggagctcagccaaacagtttcagcaccactaaaaatatgagcggagctgggtggagctctctcacaaaatgaactagagaggtggagctgggtttaggcagctccacaactccactccagacccaactcctggagctaaatttaagagttggagctctaccaaacagtccctaagagcaagtataatagtgagctataagtttactataagcacgtggaggagagaggtaataaaaaatcaaggatgttggctctcatgcaagagctagcttaacacaagctcctaggtaaatacattaaatgtataggtgagagatagagagaggagaagaaaattgtagccaatcttatagctaatccattatatatgttgcctctaagataggctaatagtaagaagtgggctctactattactctaagtgacctgcaatgctagaccgatcaacttcacatcatattaaaataacttacttcctctcaaacatgcagctcactctctctgcactcatcacttttttctcgaagccgatgttggagccagcgataaaattgtcgctcactctctctcctccccttactcatccagttaatcagtgtagctgacatgtttctcctatcactagtccagcttgtactattgtactcgctctcactcatctatgcaccaatcgaaaagaagataggaggaatggtgggcccaaataaataggtaaacaatacttatatggaatacgagaaaagataacatggacaactaggggaatatcaagtgaaaaccatcaaataagtgaaaacccgtgaaaactgcatctaaaagttttataaatttatgaaaaaattactagagataggtataggcatgaaatacattcataccaaatctctagtaattttttcatgaatttacaaaacttttagatgtggttttcacgggttttcacttatttgatggttttcaccggatatgtccccggacaactattgaaaagatcacctataaaactgcttgctatatatagctgacaggaagctaccacgcggacatttagagaaggtagccgacgctgctaaattgcccttgcccttagttttagagtaagtaagtttaatagtatagctaaacgatagctctaaaaattaacatatcacctacagctaatttttatatataatgattttgtataaatatatttagctcatcgttttttcctctctctcctcttctcttttcttcaggcatatgctcttatagtacattttctattttacttgctcttacactgcatttgatagtacctgttactctgttaggctagttaattagtgaaaaaacaagacaagccattaaatgtatgattaattaagtattaacttttacatatataaaatagatttatttaattatttaaagaagcttttattttttttaaggaataagttcaccggaggtccctcaacttaacagcgagattttttgagatccctttaccacaaaaccagaaatgtttacccctaaacatactaaaactattcacccaaggtcctatggcagtatatatgggtggtttcgctgacgtggtatcctagtcagaaaaaaaaagtatgtggggccacatgtcagctgcacatttttttcttctcttttcttctccttctcttctgttttctctcttctctctttctcttcttcaatgagagaggctcggcatcggggcagatgaccgcgaaggtggagaagagggagagggcctcccaggggcagccgtggcgggagagcgcggagaggatggcagtgtaggacgagtaggcgagggagggagagagggtcgactaggagagcgcgccgctcgccggcggcggggcccgaggtcgagcacccggcgcgttcgagcatctctgccgccgagcttgccgtcgcgccggacaccacctctcttcctctcccgccgccaccgtcgctttggccacctctctctccctctccccccgccgctgtccccattccgccgccagccacctctctccccctttgtcaccgcacctgctcaagagaacccggagagaagagaagagaaaagaaaaaaaatagagaaatgtgggacccacaccattttctcacttacatgtgggccccacatattaattttaattatttttgctgactagtataccatgtcagcgaaaccaggcctctatactgccttgggagttgggaccttttatgtaggttttgtggttaagtgactaaaaaatctcggtgtaaagttgaggaacggccggtgaacttatttcttttttaaataaaactaggaagatagcccgcgcattcgcgtggtcatgcgcattagtttgtttcgaaaatagttctaacaaaaaataaaattaaagtaatatatgttctattgttaattgagtatttattgtatctctttttatgaagaaatcttaacaaactttcattagtaataaatatttttttacatcctgctagccctctctttagttgcttcatatatatgcaattcgttatgcatgtgaatcaataaagatagaaaaaaatcttttacaaaatatttattgtattttgaatttagtgattgagtgattcttaattggactttgtattcaaatcaaattactttattctaaattgtctttttagggattttaaattatacttaatcttgtatcgtgttgtattcgaactcttcttttaatacttattttattattccaaattttagatatttataatttatacttttatagggactcttgatattttatattctacatggaatcttgatatatatattttttttatagttttagtgtttttttaaaatttttgtttgtgtattttaatcaaattgcttgttttatattttttatctgaatttaattacgaactccttctggtgatccgcctgtcaccatcagcctcaccgacattgttgacctcctcatcagtgagcctctcttgatacattggacatgacgtggcggggctcagtggcaaagatgaagctgttttctagttcttgttgaagacatggaacgtctccctctgccccctcctcttagtccttgcccttcatctaatcatttagcacgctattaggtccaggaacttgtagaagtcaatgctgctgctgccgtcggtgtccacctcactaataatatcttgtagttccaccttcatcgggctcaggcctagagtatgcatcatggttctaagctccttggtggtgattgaacttggactttagacccacacatttgaattcattcatcgttttcgaagcgctattttgctcaaatatttgtagtcggaatagccgcattatctaacttctatatagtaaatatgggcaatatggatcttgaatttaattataaataacacaacaaatcaaataaactgagaaaagtacatgtaacttgagagtcatgatcatttagctattattactattttttatatattatgtgctaggtagaaaatatgaaaagttagctaaaaaaataggatatgagaattggatcccagagatgagtaggacggtggagggagtacgtatgtacgtgcatgctcacatacggtaggggtggaggtgggtgtaccggatttatttttgtgagatgtagcaattataattattgggtctacctatttaaaggaaaatcaatggtttgatttttttttatcataatttctaggaacttttaatttatttgagcgctacatggcgtcttatgagtgtttgtaaaaaatcatgtgacagtttgagagtatttgtagggagtttaatgaatttatagtatataatagatagttaatatagcatttttttggttctttatgtactgaacagctcgctagaaaatatggataagaaagtgagcaggagagataataagagatcatttacgatggcatgatatatgttactttttataatattttattactatttagttgtgatataaaggagtttatgtcaaatgatatgtttcttatatatgtacatgccaaaatatggtaaacatagttcaaattaaaatcgaatatattataagatattctaattatttagttgtgttttttatatataaaattttgctaccataaatggaaggaagaagagaggggtggggagacatacatactttggatgtacgtacgtgctaggagaggagggacctagggagaggtgtggacgtaccgcgtacgtgacatttttttttacatatatagatctaatggtgcataaagtgaaaatcaatggtaggatgttttccttttttttcttggaatttcttagatttctctaatttattagagcgccacgtagcagcttagaagtgattgtaggagtcacatggcagcttaagagcgtttctaaaaagtttaatggaattactcatacgaagtctatttgtagacattttttttcataaagatagaaaaagaagaaagaaacaaagggaaaaaagagaagggaagatagggatcgtacacaatacgtgcatactgcacgtaggtagggacggcgggagttttttttctttaaagataatctaacgatctaaaataatcggtccacctatttaagtgaaaatcgatggtcagatttatctattttattagagtgccacgtggcgactcaagaatatttttaggatgccacgtggcggcttgagagcgtttgtagaaagtttaatggacttttagtatataataatagaagatagatagatagatagatagtttaagagtataagaagtgtgtgctcctgttaaatggaagtttagtgtaatccaatcccacttaagacagcagcctcagtcccaagtcccaactcgtgaatgctggcctgatcatgaattaaaaaaaaaattgtcgcttgcgcgcgatgaggtggagttatgctgacttttgctggccttcaggctccatttttcttcattcaacattgaggtgaataaacaacccaaaatcttggaaccagtcaacgatcagcccgaatttcgccgttgttgcttgcctacctctccactccatcattcgcaaattttttgcagaacacagcaaggagtagcagagaatgagcgagatgcagccgcacgccgtgtgcttgccgttcccggcgcaggggcacatcacgccgatgatgaagctggccaagatcctccactccaggggcttccacgtcaccttcgtcagcaccgagtacaaccaccgccgcctcgtccgctcccgcggcgccgccgccgcggccggaatcccggggttccgcttcgccaccatcccggacggcctgccgccgtccgacgccgacgccacgcaggacccgccgtcgctcagctactccaccatgaccacctgcctcccccacttcaggaagctgctcgccgacctcaacaaccgcttggcgcctgacgacgacgacgccgcgccgccggtcacctgcgtcgtggccgaccacctcatgggcttcagcctcgacgccgcggcggagctcggcgtgccgtgcgcgctcttctggacggccagcgcctgcggctacatgggctaccgcaacttccgcctgctcatcgacatgggcatcattcccctcaaaggtctgatcatttcttgaatttttcaatatacgaatcgtgtcgtcgattcgtcttcatcagattgctctgcttggcgatcgagcaggggaagagcagctgacgaacgggttcatggacatggcggtggactgggcgccggggatgagcaagcacatgcggctcaaggacttccccaccttcctccgcaccacggaccgcaacgacatcctgatgacgttccagctgcggcaggtggagcgcgcggaggaggcggacgccgtggtcctcaacacgttcgacgagctggagcggccggcgctggacgccatgcgcgccatcaccccggccatctacaccgtcggcccgctcgcgttcctcacggagcagatcccgccgggcgggcccctcgacgacatcagccccagcctctggagggaagacgacgcctgcctccggtggctcgacgggaggaatccccggtcggtggtgtacgtgaactacgggagcgtgacggtgatgagcggccacgagctggaggagttcgcgtgggggctcgccggcagtggccacgacttcctctggatcgtcaggccggacgtcgtgacgaggaccgccgccgccaccgccgcggaggcggcgctgccgcgggagttcacggaggcgacgaaggggagggggctcgtggcgagctggtgcgaccaggaggcggtgctgcggcacccggcggtggggttgttcctgacgcacagcgggtggaactcgacggtggaggcgctgtccggcggcgtgccgatgctgtgctggccgttcttcgccgagcagcagaccaactgccggtacaagtgcgtggagtggggcgtggcgatggaggtgggggacagcgtgcggcgggaggcggtggaggggaggatcagggaggccatgggaggaggggagaaggggaaggagatgaggaggagggcggcggagtggaaggaggccgccgctcgagcgaggggacggtcgctcgccaaccttgagaggctcatcggcgatgtactgctctctggtaaaaaggacagggtaatttgatcatcaaattcagtagagcgtgtacttgattggtgcaagtaaaagtattatgcggatgctagtgtgcaactgcagcatcagatccatgtaccacaaatgcgttggtgatccatggcagctgtgcaaatgtgacttctcgcctattacgaataccttggttgggatgagtctcctctttaagtaaagttagagggacattgtccctgccatgtgggacccacaaaggttggacccatatgtcagtgacccatgtctctctgactttacgtcagaggagcgcgatctcttggtttgggtaaatgtgtagacctggtagatgagctgtggcagcacccgagttgcaatagccttttacttgcgttatttctacacacgcagcggccgtcgtggcgtcatccttctattttgcaataagtttattttacctctctcatcttttgccttggttgaatcacatctctcaaccgcgaaaccgggtataacacttccttcaactaaaaaaaaggttcaaatcaactaattcggctatttgaatagtggtttctgctgacgtggcatgttggcaagtttaaagtgtgctgatgtgatagcttatcaaagaaattgaaaatacaaatgggtcccacatgtaagtggcaggtaaatctccttctcaatcttgacatgcctcgatgcgtcgctgccgtcggaggagagggagtggtcgtggtccgtcgcggcggtagaggacaagatggggagtgctcccatggcggcgagggtaccttgacctcacggcatgatggccacctagagcatgcggtcgacagcggcggaggctgatggcagcaacacggttggaggtgtggccgcagcagtgagacaagcgtggaggggacggaagtcagcggcagcagcacgctgcccttgttaccccatctacatctatcttctgtgtcttcgtctccacaagattaatcaccgagttcctcgaggcctccctccgtattcccgacctcaccctgctcaagaacaacatgcaatcgttctgttaccctacgtcgccgccgaccctggacgtcctcatgcaagccatcctattgatagaggcggacgtcgcattgatggatgtcagtgctaccatgtggtcggtgcagtcaaggctgacgaggtgcccgcggccgtggagctcagcagaggcggtgttccaggtgcccgaggagatgaagcggatgcttggtaggtggttttggaggagggattgggtggctatggaggagaccggctgatcgcaagtggaggagtcgccagccgtggcacgcattgggaggagctctccagctgcgagctcccgctagccactgccgccacctggcgagagagagaacttaacataaaagagagagaggggagagagtggtgaggaaaaagaaaaaatgagatcaagatgatagatatgtagggctattattttttttctcactgacatgtgggtctcatgagcgtcacatagtatgaaaacgctatccaaactaccgagagactcgatttgctctagtttttgaagatggaggagccattatatccgattatgaggttgtgcgaggcgatttaatcagggacaagacttgacagagtttatatatatgtcatcttatttaataagattgaaactcttattaagaaagtgcactgggaatggattaaagtttatactgattaaaaccaacccactttattccgtaataatttttaattttttgttaccagagtaatcagcttcaagtctggggatggttgtcaattaaaaaggcgggcggcgattgcacaccgatagcggcttgcccatttactgaagcataaatttggttccgtgtggcattcttcagcagttgcccactctccattctgctgatctcaacatgcaacctacttcactatcagttcatcaaagtaaagcaattgcatcatttaacaactgagaccgtcgcaagaactcaatatatatatattcagtaactttatgctacttggagaagtaaaccagcaaaagcagggtcagatgtgatcttttaacaatcgggccgcggcttgaaaaatcaacacgcctaaccatgccattacgtcagggagtttctatgggagatgcgaaaataagattattggcaatcgaaaggctcaaggtcgccggttcaccacgatggaagcaggtgaagagatcgaggacggtgaaccatccacacccacctacaaggctcatcatcctcctccccacctcccgccgccgatgaggtcgtccggcgtcagcctggtcctgtcggtcgccgacctcgtcctccggttcgtcgccatcggcggcacggccggcagcgccatcgccatggccaccacgagtgagacgctccccttcgccgcgccgttcgtccggttcagggcggagtacagcgacctcccaacgttaatgtaagcgtgtagtacgatctaagctagctagctgcagccgtcgcgatgtgcagatgacaacggaagacgtgttatcgatatgtacacatgtgtgcaggttcttcgtggtggcgagctcggtggtgtgcgcgtacctcgtgctgtcgctgccggcgtccgtcgtgcacgtcgtcaggcccggggcgaggagcagccgcgccatcctggcatttctcgacacggtagcttctgacggctgcagcttttactactggctcgctcgagccttacgtgcgtgtttgtactgagaaacgaatgacatgcaggtgatgcttgcgctgctgacggccagcgcgtcggcggcggcggcgatcgtgtacctggcgcacaggggcagcgcacgggccaactggctcgggatctgccagcagttcacctccttctgccagcgcatcacggcgtcgctcgtcggctcgttcgccgccgccgtcgtgctcgtcgccctcgtcttcctctccgcgctctcgctggcgaggcgcgcctgatcgatacgtgtgtcactgtatcatccttatttacttccgaatttgtgagatgtgttgcacaataccatttgttttcttaaattcacaaatgtttgttgacgcaacatagcaacacacattatgcgtatatgtgtatgatactcacgttttctccgattaattaacgaacttaaaatttgattacaaattcaagacgacagtagtacattattaagttcctatatatagacctatataggatatatttacaatcaagctaggaactctgtcacgtcatccagagacttgagagtcttctcgtagtagaggtacgactcgtacaccttgggcgtccgcacgaaccgatcgaactgcacagcacattagaattagcacttgtttttgcagtagctaaacgagttaatcaccgtaattaacgagtaaaaaaattaatcgtcaataatccgtattaagttagcttaatttcatttgggaatgtatagtagacgagactgacctcggtcatgttatcgacgagctcgttggcgacgcggacgtagtcggcgcggcgggcctcggggacgccgaacatggcggtggtgaggtcgaggtcgaggtacttggacttgaggcgcacgtagaacagcacgtacttccacgacatggtctccagcatgggccgcagcgtgcgcatcccctccgccgtctgccggatgcgcgccgcggcctcctcggcggtcagcccgggctcgaagaaccgctccctgacgtacgacctcgtgccccacctcggcaccgtcccgggccccggcggcgggggcggcaccgcggccgcctccgccgccatggccgggggaggcgccgcggggcgccgcgccgacagcgccgccgtcgcagccagcgccgtcgacgcggcgaccgcgagccggcgcgtcgcggactgcggcccgccgcgctggtgcctctcccccgccgccgccgccgcgtccgcctgcgacgccgtcccgcggcggcgcgccgaggtgggggacgaggcagacgaggaggagctagtggcggtggagcacaggatgaggtgcttggcgagggtggccatggcgagcgaagtggaggggagtgatagtgcaagtgagactgaaagtgaggagtagagatagttttcttgaggttggagagaagggtgtgggtcgtatggtagggagatattatccactttgttttcatttgggcctctgagacagtacatgtatgcttacactttttttttttggtattgtgaggttcaaaagatatggttgataaaaaagggataaggagagtttgtctcactagctgtgttgctggaggctgaattaaggcactgtttagatcctctaaaatgataaaagatttgctattttgaagtattttttgtcattttagatctaaacactagtagtaaaagttggagttggcaatttgtcatttgccatttgctaatccatagtagcgaattgtgccaaaaagtactttgggaccactctctctctccaccaaaaagtgctagaatgtcaaaagtttaggatgcatctaaaccaactagtacttttgtaatgccaaaacttttgctatttaccatttcaacttttgctagtacttttgtaactttagctagctttcccctgcactttaatttctaacacatgtacatactaccaaagtatttcattttatggatcctttggccagtcttgagaatttggacatcagtattatcaatttcagatgtccaatttgctaatggtgtaatgtcaagagaaaactgccctactgtaatgatgtaaaaccagacagttccaattcagcttgcaccaagtaacagaattattgtacagtagtacatctttatttctgtgactaggggagctttagattttaagaaactattgtaaaaaaatcagctagagaatatgaaaagaaactaaattttagcgtaaagtttaatttttggattatgttattatagtttcttagaaattgaaccaaaagttagattgtttagaatagctgttgattctgagagaaattataaccactagaagctccctaaatatatcttatatctaacagtaacctacaactgcgaggcttgaccccaaaaaaatgttgaaatggtaaggacagtgaaaaacaatcacacgtgaaacgatgaaagccgtctattaagcaaagtacttggggaatcaattcatgttccgaaaagtacaccgaacgtccctcaatttgtcatctagttacaaaatcgtcccccaagtgtaaaaccagatatccctcaactaattaaaatcggttacaatagatcctttggtggttttaatcccggttttatcctacatggcggcagagtcagcgtgggacccacgtgggccccacatgtcaggatgccacgtcagcgcacactctctcattcccctcttctctcccttcctctctcattttttcccctgtgcatcatggattgcggtagcttcgtcgacgcagcggggaggaggtcagggacggcggcccgagaggaacgggggtggcggcgggcgagctcttgcactaggaggggcaaggcaggagaggagggcatcggcggcccacggctagcgacgggcgacacggctgcagtgacggcaatgacgacgtcatccacagccagcgacagcggcgccgtctctacctgcgccgagacgggcagaggcaatgtcgttgtcgtggcatcaacgacgacagcgagggcaagacgcctctccacctccacctctatgtccccgcccaccatagccgtcctctacgatcaccacggcccgccccaacaaagtcctcagggtggctaggctgccgccggcagagatcggcgaccgcgatgtgtgcgtgcggatgctggtcgcccccatcaacccctctgacctcaaccatgtcgagggtgtctaccccgtttgccctcccctccccgccgccgttgcaggctacgagggggtcgaccaggaccacgccctcggcaccgccttcgattccccgctcctctcccccagtgattgggtcatcccttccccgccctccttgggcacttagcagacctacatcgtcaacccagccactgcctggcacagggtccgctccgatgtgcctcccccaatacaccgccaccatcaccgtcaatccactcaccgcgctcaggatgctccaagacttgatgccgccatggcgctcaatctgctcagctcgacaccaccatggcgctcgctgacatggccggtgccacacccggacaacacgaggcctcgccaccgccgcacgccacgtaggtgagtagtagtaaatccgtgcgacaatcttgactaccgctggctggcacatgcgcatcgaacgccttgggcttgattttggtttgtgctatgtcggcaggaggcgacggcaaagggcgagcaggaggacgagacggagatggcgagcacgaggctgagccttgagctgggcaaggtcggaatccagtcgtcgccgccatgctccagcagctcaagcgccggccaccccacgatgcagcctgccgccacggccacggcggcgccgggctatggccccaggccacgccacatgctcaccgaggtgaaaccgaccgccattaaaattccacgagccacaggccgtcgccggcagccgacgcctcctctcccgccagcctcctccccacccgttgaccagtctgcacagagaggtgagagagagagaggaggaagggagataagaggggaaatagagggggttgacgtggacaccctgacatgtggggaccacgtggatcccacaatgactcagccgccacgtcggataaaactggggttaaaatcacctaaggacctaaagtgaacggttttgtaagttgagggatgttagatatctggttttgtgattaggagacgattttgtaactcgatgacaagttgagggatcttcggtgtactttttccttcatgttcggccgatggcctagtttttactgccgagggcccaaaactccaaatgctattcacaagtttaagcccactacgacacaagtcatcttgtcatgagggacgtggtctttatgtgggctggttcagaggccagcctacaccgcctaatcaacctgccaccaactgggtaagccccaggccgtgcgaagcggcataatactctcgggctctcggccgaccaaagcaggagcaacggcggaggagctaagggcttatttcacttcttcgacaaaataaggggaaaaacataggaattttagagaattttaattctatagagattttagagaaaatttagtaagggctctaactttttgaaaaatttcctttgaatctatctctctcatttatttcctgcgtttttcctacgctccaatcaaacgaccattcatgtatttttcgtgtgttttgctatcctatgttttacactttcattcctatcagaatcctgtatttttcctattcctacgtttttctcaaccctgcaatttaaaagggccctaaaccttatcaatttttagcattttcaaatttttggtaagggtaataaactaaacaaaattttatcattgtagccttaccaaaccctaccaatatttggtaattctaaaatcttccactcacaaacatcaaactaaacaccatatccacattttgatcttacccaaaattgttagtgctaatctttaactttaccaataaatggtaaagtttatctaggtttgtctttcggcggcctagcgagtggcccgtgcgccacaaagagcaagtgtgaggcagcacggcggtagtgtgggaagtaagggcatgtttagggaagtttttgacagcagccgcttcttctagaatcttcagttgtcagaagctcccaaatagtaaatattttcattcatattttgaaaaactgtaattatagaattaagaaaataaactataatacagacgttgggtttatcagcttcatcaaattctcaccggttaacttctctcacctactgtttttcagatagttaaactcccaaagaccttaagcgggaggggagcgtaggtctgcagatctgagttagttgcccctcggccaggcaaacaggcacaccgacgggttattttattggtatttatttgcttcttgcttttaaggcttttagcctttcatgctgcttagttatttgcttcgtggtttgatacaaactgaacgattatttttggaatagaaactgaatgattttttgttcggattacaaactgaatggatgtattagcaaatgtatatgcatatacaacgcatgatcataactcttggcatactaaatattactactaacatgttctccaaaataaaaaaaataactcgacataccggtttaaggaccattgcacagatccgccatccacatgttttagaccctgtttagatgggactaaaacttttaagtccctatcacatcgaatgtttgaacactaattataaatattaaacgtagactattaataaaacccatccataattttggactaattcgcgagacgaatctattgagtctaattaatccatgattagcctatgtgatgctacagtaaacattctctaattatagattaattagggttaaaaaatttatcttgcgaattagctttcatttatgtaattagttttataagtagtctatatttaatactctaaattagtgtctaaatatagagactaaagttaagtccctggatccaaacaccaccttatttgtatctttttctgtttgtagggagtaggagtactactaatgtattggaaggacaacaacttatcaattgtcatactccctctgtaaaaaaaaaaagtaaatctaggacacatactattacaataaatatggacagatacatgtctagattcgttgtacacttacattagaatgtgtcacatccaatactatattagttttttatgagacaaagagatgatataaactgacaataagactattctacgaatctattactctactccctccgtcccaaaaaaaagacaaaccctgttttccgtacccaacatttgaccgtccgtcttatttaaaaaaattatgaaaaaaataaaaaagacaagtcacgcataaaatattaattaagttttatcatctaacaataatgaaaatacgaattataaaaaaatttcatataagacagacagtcaaagttggacacggaaacctaggtttgctttttttttaggacggagggagcatgaatcttttacctactccatgtggtgtgtccacagcaccgtacggtccaacctgtatggtgtggctaaaattttattctgggtagggatgcaagcaggacagacaagcgggtttttgcctgtttatcttatttcttatttatagtttattttctcttctaaattttgtactagcatatggaaaataaactagcaaacaggttttttatacgggtagcgagactacccacttacatctataattctgggtatgccccctgtttcgttcctttccatattccctgatctgagacatactactcccttcgtacactagtataagggatattcactatttttttttacgtttgaccactcattttattcgaaaaatttgtgcaaatataaaacacgaaaagttgtgtttaaagtactttggataataaagtaagtcacaaaaaataaataatagttctaaaattttttaaataagacgaatggtcaaatagtacaaataaaatgtcaaaatcccttatattaggggacggagggaatactaagctaaatctatttttttattaagatcttgtttagttcgcaagcgaaaaattttgacgtgtcacatcagatatatagacatatatttgaaatattaagcgtgcactaataacaaaacaaattacagatttttcttggaaactatgagacgaatttattaagcctaattaatccataattagcaaatgtttaccgtagcactactttgtcaaatcatggcacaattagacttaaaagattcgtctcgcatttacatgcaatctgtgtatataattagttttttatttgtctatatttaatattctatatatgtatctaaatattcgatgtgatagggtgaaaattttttgtttgggaactaaggccttagctaatcgcctaatcccgcagttttttttttcctctgagaccatcataagttttgcatgctgtgctgtttagctgcacggaatcgtcgcgtaaggacgaaagagagaaaacaagatgtttccttaaaaagaaaaagaaaataaaagagagatgtgacattaggccatgtcttttcatatatgctttaatataaattgttagatttttttttctagttaaattttgttaggtttgactaagtttgttaaaaaaatttagcaacatctagaatattaaattagtttaattaaatataaaattgaatatatttttataatatgtttattttgtactgtagataatgtcgatgtttgatgtcgcgattccggtatttgcatagtatggggatcgttggtactaggatatacgcgagacttaggtaaaagagatagggacgaggatttttatacaggttcgggcccctgaattgtcaggtaataaccctgcatcatgttggccgaagccggtattgctcttattcactataatcacaccagtacaatatttggggtagcctatctaactgttgtcgacatggcggtctgaagttctgactcgtagtcgacaacagggtagtcttcctctttgagtttgtgcccggcgagatcagagacagcgctagatccgtacggccggcctctgtaggtaccggatagggtcgatccagacatatctctgatgtcgatatccggtggcttgtcttgacgtatgttggcttgtatgttgatcttgtgtcttgatctattattccgtgtcttctatggtgggtgtctcccctctcctcctagggggccttgtatttatacccataggtgtccccttgtccaagtagaattagggaaaccaatatggatacaatcatagtagtccttatcgtttccatgtagaactttagtcatcctttcttatgcggaactcctcctatatctgcagattgtttccgtataagacatggtatgtggtgggtcctgtcgagatttagtcaactactattaggtatgttgtttctataaccctgacagataatattatagttttctataaatttgatcaaactgaaagaagtttgactagaaaaaaatttaaacgacttataatatgaaacggatggagtattattgttgcggactgctccacacctactataaatatgtgttttcttgagaaaattcattcatcgattcattgttctaagtttatttgttaaatattttattcatatctgtaattatgaagtaaccggtataacaaacgggtgaatactctaattttaaattgggccttaagatgttgatgtgctacatcgcaatactctattcatttcaaaatatagtgcatattttattttattagggcggttttgataaatagttgcttccataatatatcattcatgtgatacgaaagtatttttaagatgaatctaacaacatcaattttgctttaaaaagttatacatacctaattgtaggttatcataacaaaataaagaggtgtcttatattttgaaatgaagggaataatacgtacatcatattatcatatgtactagcgtcaaatacaacaaattggtctatacactaccatttactacaaattaaaatatcactagtactcaaatttagcacgggtgactaatgaattctttagagtgcaggattctccgtaaaaattaattcaattttatcgatattccttaaatctttccatttcaaaggaagcctaaatgtacagtgtactacggtacaatcggtaattgttcaaaatcagaacgcaactacgcaaggcattgtgatcctctgtcgtgactgggtgttaaggtagaagatgggcaaccctcttgtagttttgtgcctgaaaaactggccagacgaaactaattgcttttctcgacttattcggatcggagcatgcttctttcaaaatcgttttattttttttgaaaaataggataaacctgacctctacgcatccaatcggatgtatgtactgccatttcaaaattgatatgccgtctaggttctggtctaataagcaacgctagtcaaatgagacgattatatagtttcggcaattgttgactgaccatatatatgctgtctctgtttctagaagatttgtagtacttgcttgatttgatattgccaataaagttatcttttcctatctcgagagatctcagttttattcataaatatcgttgtttgagtcacttctatgacaacttggttagagcatcgttgacaaaataaaaactataacacaattggcatattcaagttttatttagaatattaagatacctgcttaagatagggcttataaaccgaagctagttttatattatagaacttaattttagaatgaatttaagtacagtttaaaactggactccttccgatcataactatttaacgttcaaaataagatttgattaaaactctaaaattatagccatccatttatttatattagaacaaatatttaagcaaaattttaaaacccggacataaatctaccaataaatttatgatattattttttgttcaattctacttatactactttaatatcgatattaagatactgttgataggtgaaattttaatagtttggtcgaatcttatcctaactaagggtgtgtttagttcacgtcaaaattagaagtttggttgaaattggaacgatgtgacggaaaagttggaagtttgtgtgtaggaaagttttgatgtgatggaaaagttggaagtttgaagaaaaagtttgaaactaaactgggcctaaacgtgagatatctacgagccgcgagatagtaaaaagtaatcccttcgtcccctaatataaggaattttggtattgtgctcgcactgtttgaccattcgtcttatttaaaaaaatcttggaattattattattatttgacttactatccaatgtgctttaagcgcaactttttattttttatatttgcaaaagttttttaaataagataagtggtcaaacaatgcaagcaaaatcccttatattaggggactgagggagtatagcagagtaccataagaatcgtttattaaaattatattttattgtaatatatatctactattataaaaattgaaaatatttttgccggtactttggtacgtcatccgtgtataagtcggtttttaagttcgttcacctttggaaatacaaatccgtatttgagtccgattttaagttagttcgcttttggaaatacagaaagagtcgtggaagaaaactttcgaaaaaactcgcatgctaatttaagatgatcagatttctaattgcagttcaccttaactaaaccgtaaaacaataataagattaaaataatcttcacccattacaacgcacatgtattattttttcagtataatataatataacaataatataccactacaatttataaaaaaaaatcaccctcgctgtggggcccacttctggggctagtacccacctcgccatccgtgggccccacagccccactccgccctgcaccgcagttgcagcagttcgcacttcccagttcccacccccggccaaattgaaactcttgtcgtcctcacctggaaggaaccccccgaacacacgcagccatggcgaagcctagcggcggcggcctcctcgacctggagcaccacttcgccttctacggcgcgtaccacagcaacgccgtcaacgtcttcatccacacgctcttcgtctggcccatcttcctcaccgcgctcctcctcctccacctcgccgccccctccgcgcacgccgcggccgccggcgccgccgtctacggggccttctacctcctcctcgaccgccgcgccggcgccctcgccgcgctcctctgcttcctctgctgggccgccagcgccgccctcgccgcccgcctcggcttctccgccggatggaaggtgcgggaaaccctttctcttttcccccctcttgctcttcactcgggggccgtcttgtgatagttttgattttgagtagctagctaagcttttcttagattctaaggtcctgaggatcagcgatggagattagcttttgctttgggttgagatgtgcccctgtgactttcgtgatggtcagcgatgattagtattttctctcgtaaatttataattaacttctcttttgtccgatttttaggttgtgatttttgcgggggaggagtagcttctccttatgtgattcatctatttcctaatttaatccgtaggccaaagaaatttcgcttcatccttatgtgatccatctatttactaatttgatccttaggccatagaaatttcgctcgattgggcgatacctcagcttatggagtatacagttttagtggtgtgtgcaacagttttagtggtgtgtgcagttctggttcgatttggtgtggtaatgcatgactggtgtatcgacaaatagaaatcatctttttgaagcagaagaaaaactgcaagtcatgacttaaatcatgtcaaatgaatcgtgaggccttgttcggtattgtgcaagtcatgaattaaacgaacaaggcctgagtgggttaacctttagttgctaactttagagttgtaaagtattgtgtagttgtctgatctgcaaataatccatagtcatttgttctgtttgtgaaaaccaattcgtaagatggggctgtgaatattcgttgtgacaggtgatgactgatgagtcatatgaagtactagtcatgcgaataacgtgaatgtagtgtttctgaaaggtgatgaaccacatgaagtacttgtcatgcaaataatatgatgtagtgtaatataatgcccatgtcggaggagctcccctcgtaacagcatgctttacccactgctaactgatgcatcaatccaaacattgggatccatacttcttgtttgtgtcatttgctgattgttaatgccctatcaggttcctgctcatggttatgatacactgatttcgcacatatagttactgttaacagcaagaaggcattttataatgtcttatgctgcatgatgtttgtttgcctcaactaattcagcttgagataagctatttgatgttgtcataaccaattccaatgttcctagtccactgaaaattgcaatttcagtagctagacagtccaggtctttgcaagggatatatttggttctgtgtccttagcacaacaattttagaatctgacccgaagatgaaattggctaatttctttttgcaaaatacctgtggctgatagacaaaaagctcattgcctcttgttttctctgtttatatgaattgaagctgttgcaagattctttatatattaaaaaaaatccataacttgtgttttttttatacaggtggtattggtagctcagctgttctgttggactatgcagttcattggccatggtgtttttgaggcaagtctctataacactagttcggagttatgactcaaacttatgtattaaatgtaactcttctcatcgtagaagcgagcgcctgccctccttgacaatcttgtccaagctttcttgatggctccattcttcgtgctactagaggtaaactgcagagaaatatatgcagtttcttgattgcctccttgcaaggtgacatcgagatcacctcatgtataccttgtttcttttgcttcaggctcttcacaagtttgttgggtacgaaccgtatcctggctttcacgccaaagtgcagaagctgattgacgaggcccgcaaggaatgggaggacaagaaagcgaagaagatgacgtgaagtgtgatttggaagttggcaacccccatactgcagaggcgtcttaatcacgtggccatttgatattttgattagacggaactgtgttaacatgtcgctgccaacatattgccttatttatgttgtaatatataaagagttttatgcactctcttgtctgatgtgtatacgttactggagaatatagaattctgatgatgattgtgaactgtattagaaaataaatacaggaaagtctttttacggtggtctcttctgtactggtactctactataagctggaaaaatatatatgtagtgcaaataaacatgtaaagtaccgtggggattaaaaaattagatgtacgagattttttcatgtcgggcattcatttttcatttttatagttttcaagtttccattacacgtggattgtacatatattttctcatctaagccattgatgtatttgtactatcgataaaagataatcatactcgcttaattttgttggtggctttcattattagtttacgacccgtttgatatgcctccaaactcctaaatttaactccaatagcggaatagaggctagagttgtgtggcagctaaaacccattccacattcctagttcattttgtgagaacacttcatcaaacttcactctcattctagatggacttgaaactgttggctatgttggagctctgccaaccaggtcctgctaataatgtaatcagatggcttgcacgaactagagggaagtgcatatcaggaccttgaaagggtacgcctaatgggcgggtgatcgctccctcccctatactccaacgctccctcctctctccccttcctcctcccctttttctcttcctactacaccataaatatttaaatttaatatttgacttataaactttggttctataaactttaggtgtataaactttagatgtataaaaattatatatatatatatatatatatatatatatatatatatatgaattcaaattcaaatttgaatcgggtatataaacttttgatttataaactttgggtctataaactttaggtgtataaactttagatgtataaaaatactatatatataaaaatatttgaattcaaatttaaatttaaatcggatatataaacttttaatttataaactttgggtctctaaactttagatgtgtaaacttaaggtgtataaactttaggtgtataaatttactaaaataggaaagtaatgcggtgccaaaaaagaaaaccaagtggaggggagggaatctaatctgatcgccgctagctacctctagcgatcaatcgctaggtagcatttccgcccttgaaacgcctgcggcgtaggaaagtacaccgaaggttcctcaacttgtcatcgagttacaaaatcgtccctcaaccacaaaaccagataccggacgtctctaaactaacaaaaccgtttactttagatcctccgatggttttgagcccggttttatctgacgtggcagctgagtcggcgtgggacccacgtgggtcatgtcagaatgccagatcatctctccccccccccctctcctctcccttcctcatctctatctctcacttctctccaatttgatggcgacgcaggcgacgcggctgcggtggcaacgggcggcgcggcggcggtgcggggaggagctgcgggcgggcggcggggggaggagcggcgcgcgggctcccccgccggccgccacccacgaggcggcggcgcgcggccggcgaagcgggcaggcggcgggcagagcggctgcggcagatgcacccgccgcacgggcctgccggaggatcgggcgacggcgcggggagcggccggccggtggagcagacggggcgcgggcgtgcggcggacggcggaggttggcgtcggcgtgggcgaagcggatgaccgggtgggactcgcgggcggcgatgtcgacgccgcggaggtggacgcgacgaggtcggggtaggcctagtggtcgggacggtagaagaagagcggcatggggtggcgggagcaatggcgctagtgcttggtggtcgcggcggaaggcgtccgtggcgataaggtcgtgcagacgccgctgcagcgggccacctcggcggccggcatgcaatcaaaataacaaagtattaccgtttgttatggacaaaagcatgaaattttattcagaatagctcatgattgtaatgttaccacattctgttcactcatagcacaaattgactctgcagtgcacacttactaacaaaatacattaggaaatttcattgaatttatccatgcagtttgcattgtttttgtatcaacaacatctgtttggttctgcttttatagttttattttgaacattaacaggctaactctaactcatatacaactggaaggcatcatcctaacttcaccagcgctgcatgcagcgggccacctcggcggccagccgtttgccgccacagcctggttgcctccgttcgccgccgcagcctggtcgcttccgttcgccgccggctcctggtcgccatgctcctcgacggcgcgaggatcgtcgacggctgctacatggcgaggcgcggccccgccgccatcagcatccccagcgtcgagcggcgcgcggtggaggaagccgccgccagcgactccactcagcggaaagaggagaagaaggaggctgccacggcggctgcaacgaggatgcggacggtggcgttgcctccgccggcacgacgccggccgccggatccccgcccccgcggggcctcctccccacccgttggccgccctgccgcctgccgagagcccgagatgagcacagggagagaaagaggatgaagagagaggaggggaaataagagagaggtgatgaggtggcaacctgacatgtgcataggtcccatgctgactcaaccaccacgtcggataaaagcaggttcaaaaaccaccgaaatatataatgtgaatggttttgttaagttgagggatatgatatatctggttttgtggttagaggatgattttgtgactcgatgacaagttgagggaccttcagtgtactttttccgcgatttttcgtggcatttctcccggcccagcataacacgggccatcgacgcgaaggttctgggctgcctagaaatgcagacccagtccatcgtgcgtgcagcgttccgtatcgaaaggctgaaacacaagttcaggagcaagaaaacaaatgaagctgacgattgaggttgctgaaaaatcttgtttcaaacgagagaaattggcggaaaatctagtcgtgttgtgctactattatactctttggtctaccaatcatgcagacagtgagaaagtgaccgttgtcaaaagtatatagtagtttggatcagcaagaaccatactggtactgtttactggttcaaaaagttctggatacatgcgtactttagggtcaatgctgcatggataacctcatcatcatgatcttggacggcgcccaactactgcaatatgccgatatgctcttgaattggctggctaattcaagatatcacaaactgcagatatcacactcttcttttaggtcagccatgcttttcttcggttttccagtaatgagctgtctacctttagatttttagatgatgggatgcccttttggaaatacagggcaaaaatcatctattgatcctgacggttctaaatggtggccaatttcagtagtaaccatgatgccattgaatcgatgttacagttcttcaaccgtatctgttgaacataatggaggtggaaaaaaattttatactaaagttcaaaccctgcttgtgttgaaagcaaaagacgagtattcatatttgtgcataaagaaaatttcaagggtacaatgcacaagatatttattaagcgtgatatggcaaaggcaaaggttttgttgggggaagagaaagaaagtattccttccgactcgaaataacttcacctttcaccattttctttgttccaaaattatattttttttagcatcttagtcgttccaaaataactttttatttcaaataatcattgcattggagtttgtcgagacactgagtcatggataaataagggatacggggagaatattgttttcctgcctatcctaagaatgagatgagctcgaattgtaaagtatgtgacgtggtatctcaatgaataataatcatcctctactataggatctggaacggcttatatagccccatatggtacatgcgaaattacattaatgtccttgagggtatattggtacatttggacgacttaagggactactggtgctagcttgcaggagtggttggaatggtcccacgacatcttattttggaatattccgagggatggcgtagctatgaagcctccccttcaacctgacaagttctagctgtcccctatagcaaaactcaaacagtgtatggtgggtaagcacaacttttctttgaaccatttaccctttgccttcatccaaacatgtaggaagcttcaaaaagtattagccgttagtcatgaatagtttgatgttgcctttgggtggagtggaaggtgcagcgcgtagtccctggtacaacagaatttgtcaaaatgcgagaaacaattatattgggagtagataacagtggcgaaccaagaacgataattaccaagggtccttaaaaaacatactaataatctaattattgactgatatactaagtaacatgatatagtttagttagaattggataatatatccgatgccctttgacccccagaaaggagaacataacaatgccactgcattagagataaagtgaggatatataattgtattgagatttgatgaagtgatgaacactctataattgcattgggattgatgaagtggtggaactttttttttctttggtattgatatacgtagtatgtagctaggaggagtgaaaaaaaaattattttgagataaagttaatagtttgttttggctagttgtgtaaacatgctggaggcaacagacatgaagtagtagtaatagataacacctgaagtgggcaaccaatattgtttacaaataagatttgacagggagattatttgaccacatattatctttagaacagcttactttatgttgctgacataatatcattttcactagtgctagctagcattactttctgcctgcacaagctgcatttcaattagaagcactcagcctcgtggacagattatgagattattttagatggaatagaaccacagggtgcatttgtccatggtatgatgagcactgcagatctgcagtagttgagattttttttttcttgatcataactttgtagttctcagggacaaacgcctgcattgaagaatgtagattattaaaaaaacaaaacaaatgtcagggacaaacgcctacgttggaaaattcagtcttaatgtcgtatgtgcagtagttcagctgcactttttttatatctttgaggtgatatatttttattggaaaattccttcttcttgatgacatatttgatgacaattgacctgcagtcctgctcctgaagccagtgacgacgtgaaacagacagaatagaacagcttgctagaatcctgagttttttatttgctttaggctagcgctgtttagttatataatcctttttcgggaatactgtttagttatataatgtcttttctggatctctgatgatcgcatctgaagaagtcaattgcgtaaagccgccttgcaaccaaccaaaagtcagaaataatagttgttcaggtaaggaaaaaaatccgagagagagagagagagagagagagtaagcacacaggaaatcccgtccctgcaaattgaggtcaatggtctacaggctgcgttctgaacaacttatacagagatttggtgcgtggtatgtaattttcagtccagttgcaacctaacatttcagttccggttactatttaatttgtacgtagattctgatccaaacaacaagtacgagcaaactatatgtaggcatcatacccttctttttttttctgaaacttcacggatcggtgcaacgctggtgcctgccttcccagaattgaacaatccttcctgaactttttatcattggacttctgaaattcgcttgcagttttcttacagcacttaaactactcctgtcggcatgccactttagtggacagatcaatgtcccctcctgccctgcaagtacacacaactctgaattctgaaactaccaaacgtgcttgccatttgttttgacaatggacgtgtgatgatctgtcggaatgcagggcacagcgcaccgaagacttcgcatgcagcaaaaggctacgagctaggtggcatcgcaaggaagctgccgggccaaacggatagcattgttaactcaaaattaagcagaccagcggatggatcagtcagaaactccggctgttggaccggccgaactagctaagctagcttgctagctagctaagctttctctgcatatcgatagcttagcttctttgcctgcaactctgcgttggccaaggcaagcgtgagagagaggcgtgagatggcaagcaaagaatcggatcgatcgcgagtcaaaaatgcaacccaccaacacctaatttgctagtactacctttgaaaaaggtcttagctaattaagtttgctactgtgtgtgctttcagagcttcagagtttcaatgctcaagaacgatctcgttggagatcgatatctatgatcgatcctggctagccttactggctctgcatcatgcatgccatgagatcgactactgattctgatcgtgacggcagagaaagcacccatgcatcgattgatctctcgaccgatcgatcgatcacatgtcacaatttgtgttgctctacgggaatctctctctctctctctctctctctctctctgatgatgattcgtttgacctcgatttattgctggtcgcgtcgtcacagcgaaacatgcattggacgcgaatgatgagatgagacggcaacatgtaaaaaccgcagttggctcgatcgagatgagccgaaactgataggcacagctaaacacggcgagaattaattaaggtgctgtgtgagagttcgagaggctgtattaattaactgctaagaaatcatgaaggcatgcacgaccgctttatgagaatggaaatggcggtcttaatctcatctcaaaaaaagaaagtaacgggtcctaatcaccatgatcatagatatcggtgtccaaagtgtggtcgagaccaatctagcatgggtacgtggcaacgaaacttagtttattttgcttcccgatcgacactagagtacaaatctacagtatatataatatcaagaggagaagaaaacaaggagcaatataaattaatggaagtagataacattcattaatcgagcaagatcgtaccagcacgtacccagtacgtataactgtataagacggtgatcatcaatcgtgtcgggttcatgccgtgccaagtaattaagctccacgagatcccgtcgtcgtcgatcgaaccaagcagaggccacgcctggttttacatggacgtctatacgatgccatgttaaatttaatattgacgtatctattgtctagttgttgtaccttgatacggatataacaaatacagttaaattaaaaatgtgaccgaactaaagaaaagaagaaaaactgacgtcacgcaatcagagatgccctgagctaacgcgtggccgcgagccagggccgccgtatgtaacacacatgtggctaatcaacgtgacaacgtgatacatgagagctacacgtacggtacgctacgtcgtgcttagccagctgcaagtgcacagtgcacttacgtgacctacctgcatgcggctcacgtacgtacgtcccgactcggccggccgatcgtgcagggcccctcgtgctgcacgtacgtacgcgatcgttacacgcatccaagaggacacctgtgcgccgcgcccgtcgcgacacgtacgtacgtgcctacttacgcaacgcaacgcgggcgcgcgctagctcgcacgatcgatcggccgtccgccgtcctgcccctcacgtcgccgtcccgcacggaaaaagacgctatcgatcgcgagagattgcgcgaccacgcacgtacgccggcatccgcccgcccacccgcgcgcgcgcctagctagccaccatgcatccaccaataaaaccagccacccctccccacccacggcccacgcccacgcccacgcccacgcacgcacacccgcgcgcggcacacacgtcacacgcgcgcggcgcgcgtacgtgcttccgtggcaggagtacgcgtgcacgtacgtacgcgtcgccgtcgcgcacattggcagctactacgtactacgcggctagctagatggatgcgcgcgttgaaatgttgggtagccaaaggaaagggaccgcaccaagccaccaaagacggggacgtgtgtactgtagacggatggcgaggaccggagaagaggcggtacgtgctacagtgaccggtgttcgtgttccatcgctcaccgcaatatcccatatgcatctgcatccccatcaccgtatccccgtggtcagaaaggcccaaacaagctaattaagcatggatccgtccatatctcttgcaaatatcgatgattaattagtcgtgatcaccggagatattttttcaacctacgcttggcagttagtatattgttagctcgtctatgtacaaggaccagtgttaatactccctccttcccataacataaaaaattttaggtggttatgatatatcctagtataataaatttgaacagacggagagagtatattgctagcttgtctatgtacacagtgacactggctgcagcaagtttaattgtgctcttcgtttgtaccgcgcgtgtgggcatgacaactagtacttttttctgttctataaaaataaacataatacaaaatattgcatattttagtaatataaatgtagatatatgtaataattatcttttgtgggatgaaagaagtagttcttgctgtcactacttcgtaacctttcacgttaattacggttgatgactcagctatgataagacatccacgtatgttcgcactaatcaatcccgatcgttccagcggcatgcacgttccagttccacttccacacactgtatacgtgagtacgaaaggaagctgtggctttaacattgtttacgacgaactgaccaactagtagcaactagcaaccaagccatgtcaacttagaaaatactccctccatttcaaaatgtttgacaccgttaactttttaaaatgtttgacaccgttgactttttagtacgtatttgaccattcgtcttattcaaaaaatttaagtaattatttattcttttcatatcatttaattcattgttaaatatattttcatgtacacatgtagttttacatatttcataattttttttaataagacgaacggttaaacatgtgccaaaaagtcaacggtgtcaaatattttgaaacggagggagtagctatagtctgcatgctgccttaattacgtacgtggagctagcggtgcacgactgggtgcaattaatctcttgtccttgaaaacgtgctactttggatacacaagagtggactactattcatctcttgtttgaatacatgaccttcgaattcctatctagaaatgtttgatttcttttttttcaaggccggccagacacaggtaacactactccagtacttagctacaatgttgattttgcaggtcaaacaattaatccggattgaaagtctggatcagtttggtagctagatgtgtacgtggagctagccaccgtacccatagtgtggttattgtgcccacagtattccattgcccatatttactcgcggataaatgcgtatagaattcggattctgttgtttaagagataaggatgacaaattagatcgtccttggtctcttcatctaagagaactctaattctgcggttttgtagatttaatttacctctacagcattagatagtccactgggatgcagtactatattttaaccatgtggtgtacgtttcttcttcgcgtaccctgttattacaaacaaatacaaaacgatcgagagacacgggcagaagtttggttaaacaaaagcgagaaatgagtcaagttagaatctatatatatccatgtcatgactgacagtgtggtatattgcacggtaacttcgccaaaagactctgatcctcgctggcgtgactgctgctagctagctatagcagccaccgtatgatgagaccgtacgtgtctgttcaatcgatggatccaggagacgacgagcatgcagaatatattattcctgattatctagtagccccggatcacgccagatcgaccgatgccccaaactcgatctgcaggccacgggttcgataaatctgacgaggccgggacgaccatgaactgatttcccttggagtttggatgcgtgcgtgtgcgcggtgccatacgacgctagctgtaagctagccggcaggcggcaacctacccacggacccacccattccgccaatccgccatgcgcccatgcacccgtgtttaactagctaccagatgtgatttttttaaaaaaaaattgaactctttaaatttttaattttaaaaacaaacaatactcatttctaaatttgaaaccttttgaacgtgccactttacctgacgtgatgaaacaatattatcacatcacacgcaattgatgtgacggttttatcttgtcactcgggtgttgctagggcacgatgaaacaacgttgctacgtaagccaaattgatgtagcaaacaatgtttcgtcatattagtctaattgacgtgaccaaattattcaaatttaaaaaaaataagtgaagggtattttttttaaaaaaaaatggtgtgatgcggtgttgctccatgtggctacttgcattggtgcctgcgagtgcgagcatcactcattttgtggtatatcctgcggtatctgttcggttggcttggtgacctatgctaagttatttttcgaccagacactacgagtagggcagtacgtatatgagtagttttaccatcatttatatacgtatgcgtgcaaatgacatataaatcttttgcatattcttatctttttattattattaaacttatggctgtgtgtcttatgacagaagccggagatgtaatccatttctattatctatttttttttcatattcccaaaagtaaaaaatggactggaagatattaccacatacagggaactccttgcaaaaagggtaaccactttccaatattgattttgtctaataagtagttattgaactgagtgatgatgagctaaggtaaaagtagctagtccctgtaagtcaaaaaggttaatttagcggatcaaaccaaccccccttgcaagctgccggctggtgtgcacaatggctgtttgttccttgattgccacgtctctttccatcaaaaaaatcaatagtgcttccagtagtatttaagcccccaccatgaaccaacccctcagcttttgttttaatttcccccttaaccacttcatcacttctctcgtcgatctagtctaaaaggttagcaaatatcctctctctctctctctctctctctctctctctccttttctcgttcttctttgttcttgctagctagctcgctattgctaactcgtttgtgttaatattctgggtcctttgcttaatggttggtgttggttttttctgatgaattgctcgatcgtttatgtgtcaggtttagtagatgcgattagccaggcagcagcagcaggtggtggtggctgcgacgatggagcatgacgtgcaccaccaccggcagatgatgcagcagcagcagcagcaggagatggacctgccgccgggcttccggttccaccccaccgacgaggagctcatcacgcactacctcctccgcaaggccgccgaccccgccgggttcgccgcgcgcgccgtcggagaggccgacctcaacaagtgcgagccatgggacctgccatgtaagccaagcttagctagctactctcgatctctctcaagtctcaaacagtcgcgcgtacgtatgatcgctagtgagtagtactaggtttgatttttcatgtgatttatgggggtgatcagagatgtgtgtgtacgtgtgcgcatgcagcgagggcgacgatgggggagaaggagtggtacttcttctgcgtgaaggaccggaagtacccgacggggctgaggacgaacagggcgacggagtccgggtactggaaggcgacggggaaggaccgggagatcttcagggggaaggccctcgtcggcatgaagaagacgctcgtcttctacaccgggagggccccccgcggcggcaagaccggatgggtcatgcacgagtaccgcatccacggcaagcacgccgccgccaattccaaggtacgtacgtgagcgttgatttggttgcacgcgcgcgcgttcgtgtgtgccatgtcgcgatctgatgggtggtctggttggttgggtgcagcaggatcaggagtgggtgctgtgcagggtgttcaagaagagcctcgagctggcgccggcggcggcggcggcggtcggcaggagaggcgcgggcgcggggacggacgttgggccgtcgtcgatgcccatggcggacgacgtcgtcggcctcgccccgtgcgcgctcccgccgctgatggacgtgtctggcggcggcggtggcgccggcacaacctcgctgtcagcgaccgcgggcgcggcggcggcgccgccgccagcgcacgtgacctgcttctccaacgcgctggagggccagttcctggacacaccgtacctcctccccgccgccgatcccgcggatcacctcgccatgtcctccgcctcgccgttcttggaggccctgcagatgcagtacgtccaggacgccgccgccgccggaggagcgggcatggtgcacgagctgctcatgggcggcggctggtattgcaacaagggcgagagggagaggctgagcggcgcctcgcaggacaccggcctcacgtcgtcggaggtgaaccccggcgagatctcgtcgtcgtcgcggcagcaacgcatggatcatcacgacgcgtccctctgggcctattgaaatattcattcatcatcattgaaaattgcattagccattattattagtactgttggccaccgattattgattgtgttgtaatattggtattgttgattataattaattagtacgccaaagagacaaatcacaagagaacgaagtgtgtatgctgtagattaattccgtatgtttgtgaaaatattcttgaacccaagtgaatgttactagtgcttttcagatgctcatgtttggagcgccgaataccgacgccaatcctgtcaaatcgcacagttgtttgatgcagaattcttggtacgcagctgatctctcagagtgagagaggagtgacctcagcctgaaacctaaaaacttgagtttgcggttgtgaaaggctaatcctgcattaatacttagtgtttggttctgatactgtcagacagcagccaaatcactcccatttcctgctgcttttatccattggctcactacacattatgtatgtccgtatcaaaatatagcaacctctaaaaataatttcttttctcagaatttagcaacatcttcacctgctaccccatgtcaacaagtcgtaataatcttttaatttcttcgcatactcttcttatttaaagcaattataatcatatatatcatgcttcattttaaatttcatctacttctttaatcatcatgaaaattctaaaaattcttatattttaaaactaatagcttaacatatcttatctagctagcatttgcaacaacaagatatcataccatggcaggctccatcatctttggccctttcgatatgatctcccaacacatgatcgaataggagtattatatatataagatcaaccactgctgcagctgcatcgcacatagtcggcatggaaacatccaaacaaacagtattgccatatttccaccattctctggtttccccatgactcgtcccgatttgcgtggagcccagcaagatggagatgtagctccgtgtcatctggttttgtcgccatggcaaagcatgtagtactatagtgtctagtgatcgatcattcgatctggtgctggtgccatcatccgaaagctcttgttgctttcagtccaacatgtatagacggccgtgcagtgcagcagcagaggctccagctgatcatttttcagagatataagctagtactgcagtactgtagtagtacacactttttttttcttttttttttttggtggagaacttgcagtactgtactactgctgctgctgctatattctaacaggaagcgcagttggttcaccaacctaaaaagaaataaaaaccatgaaccagtatgaccaaatcacgcagcgacaggtgtgtcgcttctagatttatgctctgaagtagcgcagtggaaaggggattatcttagcatatcccttcgcttttgtttaagtgtgtcgcgtatctttggacatctctccttccttcttgatagaatgataggctcctgaattctattctcacctgtcgattgcggtctaaaactaaactaatgaaaacgcatcaggtgccgggatcgatgcatgaatattaatcaagggacatttttgttttgtaacatttgtgtagtgtgtccggtgctgctccacgtgtttgtatgcagatgtgtacgtgcaagctcagatcgattgatcgatcagtcgttgttaaattaatcgtgatgattgagagatgaagctgaccatgtacgtgtgtggaatatctggggatgattccctactagaaattagaagaaatcaagtctcctagttaattatccaatcctacagtttcacactcgggttcgtcagtggggttggtgcaaagtgcctagttaaccatttgacgcaaggtgtaaaatactcctacatagcgagaccaaatgcagtattatatactccctccgtttcaaaatgtttgacaccgttgactttttagcacatgtttaaccgttcgtcttatttaaaaaaaattgtgaaatatgtaaaaccatatgtgtacacaaaagtatatttaacaatgaatcaaataatatgaaaataataaataattacttaaatttttttgaataagacgaatggttaaacacatactaaaaagtcaacggtgtcaaacattttgaaacggagggagtatatgtcactactcctactttttagtggttaatgaaacctaatataaactccttggactcttaaaagaattcagaagttaacctcaaaccatatccaactttaatttggtttggggtatcatgtgtacgtatattgttgggatgtcgagatcagcctcaggctctacaagacgaactaaattccttaaatattctttttcgtactctttgtggcgatcgcaagtggctgaaattaaaattgtggacaatctttaattcgtactagcactgattaattgctctatcagtaatagatcttgacgatcttggcagacggttacatggttaatattggcatctggtctaaatatatatatattggcatctagctatgcattgaacatagtcgggatacgtcacggaaaaagtacgtgtatatagctctcagcatgcaggcgacgaatataggcagatatagaagattgatgttgcttcagggttcagacaaaacctggagatacctgatcccaagaaaattatagaaaaagattatacaatatcaaatctaaagccggaaaaaagaaagagagaaaacgaatggggttgatgaagtgcttgtcatgcatttgccattcctctactagatgattttgccaggagtagaagacatgttacacgaaatttgaaaaatggaagaaatttaagataaagtatgattctaatatgattcgcgtgtagatccaatttagacatgtcataaaggctgatggaatttgtgttttagaatttgggagagcgagagccgaaccaagaggtgatcaaaagattttttttaatttttatatttactttttaaaagattttaagaataatttctcatttcagaattttacagaaatatactcctcacgtcctatcatagggcggtgcttataaatcgctctacggtatagcgatctatgggatgtggcaccccgcgcttggggcgtgctgtggcaattttgcagggcgtgccacatcatatagatcgctatcaaagggtgggaggagtatatttttgtaaaaatttgaaactgcaatttatttttgtaaatctttttaaaaataaaataaattctcttaaataaagggtcaaggatttgaggcgaagcgcacaaaaatgcatattgcaggatggaccatagactatacggcccattgggacgtcaaattgattaaaggcccatgtcatatgggcatatggtgaaggcccattaggtacctcaagttgggaaagggcccaggttgtatgggcgggtgagggtacgatcaagtctggggaaaaagcggaaaaaaaaaggacccggataatggatcgggggtttgaacccgacgtgaatcgaacacgcaaccttctgatctggagtcagacgcgctaccattgcgccacggatccggtcattgaacaatcgtcaacgttccacaatttagctggtaatattacaccagctctagcatatcacctccatcagttggcacgagcacatacaaacgcaccgtacgatcgacggaccgacacatcagtacgcgcgcggtgccttcaacgcgggcggaaaacgagcctcgcgcgcggccggccatggccacacggctacccctcctccgccatcgccaccgcgcgcgtgtcgtttccttcgtcgtcagctagtagctgcctacccggctgcatgcactacgcgcgcggtacgtacagattgcggtacgtctctttccccgtattgattgaaaccatgtgtccctgtcgttgcatatgcccctgatccatccagccggtggttgcgccgtctcctcgcccgcccgcccgctcacaaacgcgcaagtctcaaaagccgagagcgcggcaccaccgcagcatatgcagcgccgccgtctgctgtccgaaattggattccctggttgctgctgctgactgctgagccatctcagaggttggcagagcctcactcctgcaggctgcagcctgcagagtacgtggtcagtgctgtactctggattaatctttttgcctcttcggctagctaatttacagtttacagatgctgagatgatgctggctggccatggtaatataataggcgtacctcgccaagaccatgtggcatgtccgaaagcaggatgactaattaattaagtactaacgtgtgagaattaagaaacgacctctcacatgcaagattatgagaaaaggaagacttaagtttactgttactgtacgtgtgtaccaactcccgattgagatatgtgatggattggtcaaaagactgactgtctgtttttcacagcactgcgaccagtaagagatacacacagtatatatacgtactagtactacggaagccatgttcagatgccatcaggaggagggcaagaacagaacggtgttcctgcaaagtttatccttggaccgctctttggcgttataaattgagatcatgcgtgctcatttaagcggctactggtgtactacatggcgtggcgctgtccgcatgtgcagccatacagcgctaaaaaggatcccagtttctcccctacgataagaagcatttttcctgtttaccactgtgattcctttctgctataaatgtgtgttttgctagtccacgccaaagaaaaacattgagcattgaccgtgtcagtgggtcgtccagccgagtaggagcactacttttttttactgcgtgcgcttcttctcttcagattaaactctgcaggagcaggaggacagtcacatttgttctgaatatcatcaatgctgtcctcctcttcatcatcacactgttttacgctaattattcttcttcacgcttggaacagaaaaagacactgtattccccgggtcgtaacaaatatcacaaaacagtagcctgtaacactgtctctcaagggttcagggtaattagcctgtaaccgcgtgtgattctctcgctgatcaacctacagacacattgaatttctgagggtcatgcttgctgactgtagaatagtaggagtagtagtgaactagtgatataccgtacgtcagcgcgcgcgtaggtactactactagtacgtgcgtagagcctactgcgatcgagtatccgagggatgtcggacggcaggtcgcgtcgttcatccgcaacggcgaattcagctcgatcggtgcagaatttgcccaggtttccgtagctaaggtggcagtctactacagtatttatggtcaaggcatccagtgatgttatatacaccatgtggaattgtggatctgatataagccgtggagcatttcatggaaatgaatttagcatccaatgtattgctctcattcaaactttgaccgtttcaattttgggaataaatttgtaaatgttttaatatatagggtactgttggagtatgttgtatgttaagtagtagtataaccatacgactccgttcatcgacttacgctaatttcaaagtaatgatagtcgaaactgcagcagtactaatcgacattgacagaaatggactcatcactcgagcagacgtccattaattttttttattcatttaaataattataaaaaaataaaaaaaattaacaaagatatgatatataactccataaacatataagattaaatttgacttctacgagttgtaaacaaaaaaataaattaaactgaaaccagttaacgtaaattcacatttgtatttaatatttgtgttacaatttgcaaaaatcaaattttaatttgcatatttttttgcggggattttaattttaatttgcatatttgcaaagcgatatatctcatattaatatgtcttgttactttttttgtttgtaataattatttagatgatatgtaagaaatgagggatatcctcctgagagagaactattttcccgacattgacaagtatttatgaatggagatagtaagtagacacagttaaaacgtgctcttggaagcaatgctggttgcagtggcaagtgatgagcagattcacaatgtgctcctcctcgtaggcagcatagcaacagggatacgtatcgccgttttctttttttcttttcggttggtagaattcgaaagggaagggcgaaaaaaccttgtctttcatgtttggaaatccgaagtttaagatgagccaagacataattccttgagatgcacatgcggctgtgcgtgaatcggtttacatggggtggtcctgcaacaaatggacacggaaccccagtggccagtgttcctggctaaacttcctataccatcagatgcaggtgcagaactgcagatagacaaaatttatttacagcgcggtgcgttttcatttctgtccttatttcaaacaaaagaggaggcagttttgtttgagtacgtatgacgccagagtcttttcaaaatttggaaagaccgaaactgcaacccttgaatgggattggcccgaacccgatgagtaaaacgggttgccgaaaatgtccagcgagtcaattgccaagtgagacggaacagagtctttttcacctgcaggcagcaaagggggcgttgattccacgcaccgccataactcctggccagaacagagggcatgccgtacgccagccagtgctgggccagaccagtaacatgtcatgacgcgtctcttgttcatggcacggtaaaccggccatcgccaacacccccaaaaaaatgtggcagctatccgacgagatcgataaaacatggccgtgtgaccgatcgcattaacatacacaaaagcctgtcgtgtgttggattccggtgactgcaccttgcgtttacagcacagtggcgcacgcacgatcgatcgaaatgacggggagattacgcgcggccaccgagcaaatcggcggaaacatatggaggggagcaccgaaaattcagcggtgcagcgcgcacgacgagaggcggcacacgcagcggtagctcgaccgagaaagaaagaaagaaaaactcgatcgccttgtgttacttccaccgcacgggcgactggattgatctggacggcagagatgggtcgtgccgggactggaacgaagagcggaataccgaccctgccctcgcgtcgtacctgctgacgtgtggggccgccctcgcggtctcactgaattccaccccaagaagaagattctgaacatacgatcgactggctgagtgttacagcgtcgcgtcggggcctatatatttatgccgctgtgtggactggacgtctggaccttggccacccaaccactgcaccggggggcactactgcactcgatcgatcagtggaaagaagagctctcggctctcgcggagtggaggacttggagtggttgattgatcgatcggagcggatggggcggtcgccgtgctgcgagaaggaggccgggctgaagaaggggccgtggacgccggaggaggaccagaagctgctcgcctacatcgagcagcacggccacggctgctggcgctcgctgcccaccaaggccggtacgtgcgtgccatgcgatctcggttttcggcctctgataactagctaaatcgcctgatcgatccgccaattgctcactggtgtggttttttgggggaatgcgtgtgttgacgcataattcagggctgcggcggtgcggcaagagctgccggctccggtggacgaactaccttcggccggacatcaagaggggcaagttcacgctgcaggaggagcagaccatcatccagctccacgcgctcctcggaaacaggtgatcatcgcctcgtgctgtgcaggtgtacgcagcacttctgcaggaatcatatgctttattttcgacattcttttcgccctctacactaagaaattattctaaactctcctgggatactcttcgttgttatatgacatctaaatggttataaaaaaattaacaagatatattaatatgtgataaattactccataaatatataaggtcaaatttaacttttccaagttgcatgaaaaaaacaaatttgactatgaatatatgttaactagttatagtttaatttgtttttttaacctgtaaaaattaaattttaacttacatatttatggagttttctattacatattaatctatctagttaatatttttaatttttttataactatttagatgacatacaaataacgaggagatattctctcgagagtagaatctgctctccctctgcactgcagtgctctgcaccgcacagcctctccccactttgacgaccatgcaacacagtacacgtagtaccgactgtcaccgaagccagatggatgtagagtacagtacgtgagataagagtgaaaaaatactggagtccatctaccgggtcctttttttggtttcaccttagtcacgtttacaattaaagcccttgagcccccgctggcttcgctgtgcctcaccatgcgtgtcagggctagtggaccatttgtcaccgccttttgccctgtccatctccatgttgacttgcctatctccgcctccacaattcactgcacgcaccacacacacctccaatcatttaggcattctataggagtagtagattcaggtggtaaaagagaatttgcagttgcaacaatgcaggaaaaaaaataaaaggtaactgacactcagacgcacgtacacaggtggtcggcgatcgcgacgcacctgccgaagcggacggacaacgagatcaagaactactggaacacgcacctgaagaagaggctcgccaggatgggcatcgacccggtcacgcacaagccccgcgtcgacgccgacgccgacgtcgccgccggcggcggcgcggcgggcggcggcgcgcgttccagggccgcggcgcacctcagccacacggcgcagtgggagagcgcgcggctcgaggccgaggcgcgcctggcgcgggaggccaagctgcgggcgctcgcctcgccgccgccggcaacggccgcgctaagcggggtcgactcgccgacgtcgactctcagcttctcggagagcgcattgttcggcgcaggcagtgcggcccccgacatacacggcgccgcgcgcgccgccgccgttcaggccgtgcagtcatcatacggggaggcgtgccaggagcaccacttcggcggcgccaccgccgagacgagctttgccggagccgggacgctggccggtgtccttcttgactgctccgtcaccggcgccgaccagagattcgcggagaggaccgaggcctgctccggcgagctgcagggggaggacgacgacgacaagggctactggaacagcatactgaacatggtcaactcgtccatgtcgtcgtcttcctcgtcgttgacttccgaggtggtcacggacaccgagatgttcctgccggcgacggcagcggcggcggcgtcggcgacgccggtagagttctgaacgctgagaggagcctagcccacacgctcgcggctcgcagcctcgcactcaaaacattgattagtctgtgggctgtggctgtcgtgcaagtggctagtactaatattaattcgttattaattagcgtgttaggttaatctcgccgtgttttggttaatttcatctcgctgtgcaataagcatgtactgattttggtttgtttctgttgtctcgtctgatgtaatgtgtgttgagcaaagaatagtatcaacggttgaactatcacatatagtactgctgcatcttgaattctccggacttcaatttaacgggaagcacagcggaaaatattttcactgaacttaatgttttactactcccagttaataattatacaacttttaattccagacaatgcgtgtctcatcgcctacttgattaaaatcgtgaaaaaaaaatatcggcccaaacaaagcaaatcaaattttgtgatccatttctaaagcccaattttcattcacctttgctattcattggtcgtctgaaattggaagagccttagggcatctcctgtggaaaaatcgattcaactgacatacatcagttttggatttttgattgaatgcctcagtgtggtgggtctcacatggattagcctatggccccaggaacgaaatggtgttttattcaacttgattcgttcgatttcaagctctcacaagttgatttgattgccacaacgtgtataatcaattatcttctacgtggttggatttatagcacacaatgaatatggccttaggactgatgccataaaaactgatctgctagattttactggattaggggtacaggtgtagtggccggtgggaggggaagggtgattttataagaatggccaaggtagtggaagatcatttagacaagcgaacaatgatgcattagaaccgtgaggatgaaagaggatgattggcagatttagtgacatcaggactagagtggtggaattgtaccgacactgatgtagaggcatagcggcggtgacaaaagaggaggatgaggggggaaatgccggatggcagtatttgcgcatggggattgtagagagaagcgactaggttgtagggattgcacaaatcccgctacagtgttgtctactggtaatagaaaaagaatataaactactgatccttttctatcaagaaatcagattaagaagctatgaaccgacatgcaaaaaaagagtaaaattccccccccccccacactatcttaatctctttgtttatccacacagcgaaaaaccaagaacagggacaactctatcaagcacctatatatatatatatatatatatatatatatatatatatatagctatcctgcattcctattagagagaatctattctatatcactgagtttgttcgagttcaacaatttgtcattgacattgttttttttctataatataccgacgactttatcaattgttctacaatacgctattgggttgggccttttttttcaaaaatacctaaaatatccttagagacatacaagattaacaattgatttatctcattagaagtttcaaaaaaatatgaaaagttttatgtggccttgttacacaacatggaagtttgtataatgtttcaagttttttctggtatatttagtttttagaaaaaaaatatttttatgtggtatatgagagaaaatttgtttatataagagataatagcacaaaaatatcttatgtagtgtatgaaagatgatttatattaaaaacatcaataaaaaagtattttatatagcatataacaaataagttatatattctgtaaaagatataaatgtaaaaaacttgaaacttctatacaaactttcatgttgtgtaaggagatcatataaaaattttcattttttttgaaacttctaatagaataaatcaactgttaaccttatatgtctataagggtattttgggtatttttgaaaataatgtccatcccaatggtatattgcagaacgtacaattgataaagtcgtaggtattttacagaaggagacaatatcgatggcaaatcgttgaactcgaataaactcagtggtatagaataaattctctcttcctattatgtagcaatcttatattgttatcctcattcaggaatcggtgtcacaggagaaggcagctcatctacacgaaactttgttgtaagaaaagagctaattcttgatggacttactacatgggatttctctgataagtcttatggggttaataaaaagagatttatagagtatttattccatatctgtcgttatcatgtgaaattattttctcttcatctcgttcaatttccttcaaaccgaacaaggttataagattgtgaacccagctcgattgaacattaatttgaaccccttctgtaggctatacctgtacctacttggctactgcatgtctacatctacatgtccatgcacagtgtctctggcttttcgcacattaacgatgaaccggtcgccggtcggtgatctgtatgtagtgcctgatcactagctagacaagcagatagtaagtcgatcgatcggcttgcacatcaacgtcgtaaaagaccacgaaaaaaataacgtgctgttgggcgtatgatggtcgcgagtttttccggctttcaaggtgtgtttatacgtctaacaaggaggtgcggccaacgaaccgcgtaattgcgtaaacttaacattacggccggcgttaattacttggtgcaacttcgtcttctccttttggttctttcttagctgacagaagcaacgcgttactgatcaacttaattaattcctcgtttgtttctaaactagaatcagattcagttcggtccttcattacgctgataaaaatgacaccctctaattcctctaagaaaacgaaaaactgacataaatcttgaaccaggcccagctaatatccatcaccttgtgaactcaaagtagtacaagtacagtggtagtggacgactagtactcgggcaagaaattgggcccaaattacacgaagcccataaacaaattggccttctcgagttgcactccaaacccggcctaactgaacacgcacagcacatcagcccaagcccacttagaagagaaaggcccagttaaatgctctggtcgtctttttgcccccattttcgcgatcaatgatttcttttctccctctcctcttctctgtatctctctattacatggaagatgtacaagcatgcatactatgtgtacatgcaccgtgactcatgtaagcgtacctgtatgtgaggattctggatataaatactgatgatagaattccatcaccatactccaatacttcagtttttccatactctaatgacaggttttccatatgtctctcagggtttttatgagatcatggagaccggcacatcattaaattagtagtttgaatatcgaatacattttcctaaaaaatgaacaaaattggaagaaaattgaattagtaacaaaacacctgaaattagtaatgcgtacccataccagcatccaaggaaatgccaatatttaaattgagtcagaaagatatatataatgaaattagtgatgcgtgcgtacccataccagcaccgaaggaaatgttatatttaaatggcttcggtacggagtatctttttgaatcacgggaaatatttgcacttacttccctttccccaatagaaaaggcatctactggtcataaaaattcgctccaactgatagcctcttctctcttttctaattgctgcctagtacattgttgacatggtctcaaagtacatatgtgatcattgtttttttttctaattatatttataaatatattttaaaatataaataaatgtgattaacatgtgaaatcttaatattttatataatagtgattttttgcaagctagtgatttatatttgagtgccctcaatttcaaaactaaacaccggcggtgtggtggagccgtgggtgcatgactccgcctatcaagatttaaattttggtgccaacgaatatttacgcacatgcaagtggacttatatacgaatttagtgagactagggatgccgctggtttccatctctttaagcgtgtgatagggagcatttgcgggtgtgtgattatgatgtagcgtgtgcagtggtgtgcacgagtgtgcttctactgagtaatcacaaaaataaaaaaaatactacaattctaaaattgaaatttatcctaaattaaatgtaatcttagagtatcattttctctccaaccatctctccttcaaattcctttctatcttacccaaatactcttctaatcaaggtaataaataccgtataattgtctggtagcagattgtggataatgggtgctaagttccaatagcagaattataaaaaacaactataaatttagattgtacatcaatatcaacatcaagttcaactgaagatttagaatttagattgcacacttaattactcctatactcctatttcataacataaacaaatatatgaaatacatataaatatataagataaagaaggcacacgatgctaagtcatatactatccctaaatatataaaaacatcgttcaagcattatagcggtacaataaagtcaatagcgggctgctattgcgatcgtgaagcgttatagtggccactaagttctaacacgctatcttcggttcgctatcttatagtggtagcggtagagggtcactaccactattatggtcactacgaatgctattattaccttgcttctaattttaaccatccctcgtttaacgtcaggtgtaactaatttaggatggagcgagtacaccatttatttaagatcagcggagcttcaagttattaaaaaaaagaaataaaaaagagcggagctgcacatggactcttccatcctccaaaggcaaactgacgagtgacagcaaagaggcgtgcaacttccttaaaaaagggtgcaaggcctgcaactggtaagttcacagggagtacttacgtacgagagcgtgaaagtggaaactgccccattttagttgttgcttttgcactgctcgaatccccagaatcttgcccttttcgtctcactgatgattgacacttgtgatcgccaggcattagattagtacttttgctaagcacgatgacaacaggagatcagactaagtcctgttggtcactttatttttgaggtgctgagtcatatcctcgtttggccattggtcctagggcatcatattgctgcttctgctgcctcacatgggctccagtaaccaagaactttgttttgttcaagttcccatgtgtacgtggtttggtttgagtgcaggcagcttggagatgcagcattgaggatttcccaatcaagatcctttgtgtcaagaataaggaaattgctgctgtgtactccaatatttcatgaagcaattttaattaggattatatgagtagctaggatgcatgggagatatttgttttcctgcaaaaacaggtcctacaatattaattatacatttgaaataggctagcttgctcctgcttgcacctgtatattttttccttcagaaatgaaggtctattatatgactggaaattaattatacagataaactattgtgagtgaacagagtattgacctctctttttttttcagaggataatatagaggaatattggtagctaggaatcatgttaaagaactatgcataactacttttatatgataaagaagagctaagcaaaaatttacagtcagatggtaacataaggaaaaatggtactatcaaacaatcggtcttattggggaaaagggaccacataggaatttatgggattaggatggttgggaagcatgtagtagagttcaaaaggaatgaccagagcaattgatactggaaatttctttgacatttttttcatgattctagtgcgttcaacctcatgttaacatcaaatcccaacattttcctattctttcatttcgcgatactactttacaaactatccacgcataccactcattatgtcactgtgaatgcattgagatacatatgagacacttgttttgcttcctagagtgcgtccatagttatgcattttaatgcttccaatctttcaaaaacgccatacatgcttagaatttgacttgacctcttattcgactggcctcaattttgggctggtagagctttgataatatgtattggtcttgagagtagcccggcccaactacatattattgaaatttctatggaatttttatcgacataaatgaaaagaaagaacataatgataattatagggtagattttaattactatagtcggggcaaactttcaggatttatttactttttattgtctctagttaaagctctatctagctgcatggcaaacaacacacaaaacattaataggtaagcatgatatttgcgagtgttgagatagaaatatggatccccttattaacattttttgttcttttttgaagtacaaagtgaccagtattgtcctatgtatggttaataagagtagaacaaaatgtccatttagctactacaaaatgtaaaacaccttttctttaaagcatattgtcctttcttttattattgtttgaatttttttatatcgtcatgcataactctttgtgaaagaaacactttgtttgatgtgcatcgtattctcaatgatttacaagataaagtgtaaaaacttgagtttactcatcagtaataattactttttttgaggagcttagtgaccgtcaatttctttggcttaacaaataaaattcaatatatataagtgaccaaactttcctccctctgtaccatttgggaactatctacaaacttttatatgcatgaacatgtctacaaactatctacaaacttttatatgctcgtgcgatcgtgccacttcttcattcgtttggcggccaatttttaacatatccatatgactttcttggcgtgcaataaaagaacaattttgctatatctcactcgaaagattttttcttatctctcactcgattttctcacttaaatttacagtgcatcttcttgtaagttacagtgtaatttatgaaacttacactgtaacttttgtaagttacactgtaatttttgaatcttcgcatgtaaattttaaattttgtattggatttggtctttttcttgaggatatggtaatttagtgtctattatggtgtttcttaattgctttttgctttttattatatctatcagattttaatctataagtcgactttgtgaactaagaatttttttagattactctagtaaaacgaatctccaactcatcgaagcacaagtaacgacacattgccatttataaaatatcaagataagaaatgcttcacaacaatagtgcaaacgaaaattcttgtaaattaatctcatggagtaaaatgaaaccagtgtgttaaattagcgacaatacatcatgccatcatatatcatagttttggaggtcaaacactaagctctagtgtgttaaaccgtgggctatgtaatggtgctatagactttctagaatcccttgaaccatatgcatttttgtggtcataataacttattgaactcatggacatcttttatgcatgacgtgaatataatagataaactgaaaataaatttgaagattattttttactaaataaatgcactagctgaacaggagttcaggactggaaattctattttctaacctttttttatcagacccctaaacttgtagcagaagagaatatttgattagccttcaagatgatttgaatttccttttaaaaataatatggccattggccattaattaagcaagttactgatcccacctatatatagacataattatctgagtaatacaactttagtttgcatctgttgaattttagttctccaaatattgctcaaaaattaatttaaattaacttggtgttttctaaaggaacaaacaaaactgatcagtctaaggatgcatatgcatgtatctgaatgaacaaattaataagtctactaattaaaggatgctctgatctatttcgctcgatatatataacctctcatttttctcttgacatgtccaccatgattgagtgtaggcagaaaccttagcttcctcagagcgtaaaaggcactttcacagggacatatggtgtacttggtcacatgggttcgctctgctaatcgcatcgctttccggagctcgatccgtttctcattggccagtgcagcaagcaggacatgatggccgtcacatcatccaatcccttccccattggtcggtgtacggatgaccaattgaccatcaggacctcgatttgggcgtttacggttttgttcgatttattctgttaaccactccagcttaccttagttcaaaacaaacgtaagcgtatacatcatccgtgggataaatatccccatacgaatcgtgctcagaaagacgaacacgaaacatttcattgacgtattacaatatattatggaccgattctacgtgtcgagcgggtaaggaatgtctaactaccaagtaaaaagctgctatcgtgacgatgccttactggaatagagatggtgtttggtgttttgtgggtaaactgtggatctgctagtatcaaaaggtgcgataccatcattactaattaaatatatgtactaattaaatatatgtatgcgacaggttgtcaccagcatatataaatatggaaacttatagtgctatatatgcaatactttatgtatagggttataggttgttattattggatagaaatgaaccgattggatcgaatatttttatttaagaggccaatagggcaaaacagaattaaagatataaggttgcatgggtaaatattggcctgtacagtttgtagccaacgtgggccttaaacaaaatattagcaaggtgaagtttgggtattatcaaaacttgcatttggtctgctattaaattgaaaccaaaattttaatttatgttacggttgattggttttaatttatctaatgtttggtttaatgccatctggagtaacaaacagtatatgctatcaaagttttgatatttttggtaggattagtactattatggtagcataccatatgggtggcgtattccattgtcattgttaacttttgatacgtttttctttgcatccatccgaacaagcccataaattatattagtgcttgtgtgatatttgcaaaaaagtacgtagtagtacatagtaattaactgtataaattaacatttcttgttaaatgttggcatgtatcatgtagatctgaagctgatcaaacaacttatctcgttcccgtacactcacatcttgaaactagctagtttcaatcgggactaaagatgagcatatttaatcctagattcggtgtctctgtttgcaacccagaattaaaggggttgtaaactgagtgtgaaaatgagttttccagcactgtagcttgatcatgtgggcttgtaaaccgccatgcagacatgcacatcactcaagcaaagctacagaagttgctgttacagggaaaacgtgagcttcacgtgaacgtcgtctgcagatgctgcagacatcatgttgcatgcatctctcggttttgctataacaagcaataatcacaacttttaatgccaaaagtccaagtatgcttctcctacgactatacgtatagcctttatacagcaagcactggtactttggttacatatatcaagagcgaatcaggtttagtctattgattcctttccttcctgatgacgtttaattattctagtagctttttaggtgttgtggccggcaggaatctccgaatgttcagcattttgtagctaactaggaagatagcccgcgcattcgcgtggtcatgcgcattagtttgtttcgaaaatagttctaacaaaaaataaaattaaagtaatatatgttctattgttaattgagtatttattgtatctctttttatgaagaaatcttaacaaactttcattagtaataaatatttttttacatcctgctagccctctctttagttgcttcatatatatgcaattcgttatgcatgtgaatcaataaagatagaaaaaaatcttttacaaaatatttattgtattttgaatttagtgattgagtgattcttaattggactttgtattcaaatcaaattactttattctaaattgtctttttagggattttaaattgtacttaatcttgtatcgtgttgtattcgaactcttcttttaatacttattttattattccaaattttagatatttataatttatacttttatagggactcttgatattttatattctacatggaatcttgatatatattttttttatagttttagtgtttttttaaaatttttgtttgtgtattttaatcaaattgcttgttttatattttttatctgaatttaattacgaactccttctggtgatccgcctgtcaccatcagcctcaccgacattgttgacctcctcatcagtgagcctctcttgatacattggacatgacgtggcggggctcagtggcaaagatgaagctgttttctagttcttgttgaagacatggaacgtctccctctgccccctcctcttagtccttgcccttcatctaatcatttagcacgctattaggtccaggaacttgtagaagtcaatgctgctgctgccgtcggtgtccacctcactaataatatcttgtagttccaccttcatcgggctcaggcctagagtatgcatcatggttctaagctccttggtggtgattgaacttggactttagacccacacatttgaattcattcatcgttttcgaagcgctattttgctcaaatatttgtagtcggaatagccgcattatctaacttctatatagtaaatatgggcaatatggatcttgaatttaattataaataacacaacaaatcaaataaactgagaaaagtacatgtaacttgagagtcatgatcatttagctattattactattttttatatattatgtgctaggtagaaaatatgaaaagttagctaaaaaaataggatatgagaattggatcccagagatgagtaggacggtggagggagtacgtatgtacgtgcatgctcacatacggtaggggtggaggtgggtgtaccggatttatttttgtgagatgtagcaattataattattgggtctacctatttaaaggaaaatcaatggtttgatttttttttatcataatttctaggaacttttaatttatttgagcgctacatggcgtcttatgagtgtttgtaaaaaatcatgtgacagtttgagagtatttgtagggagtttaatgaatttatagtatataatagatagttaatatagcatttttttggttctttatgtactgaacagctcgctagaaaatatggataagaaagtgagcaggagagataataagagatcatttacgatggcatgatatatgttactttttataatattttattactatttagttgtgatataaaggagtttatgtcaaatgatatgtttcttatatatgtacatgccaaaatatggtaaacatagttcaaattaaaatcgaatatattataagatattctaattatttagttgtgttttttatatataaaattttgctaccataaatggaaggaagaagagaggggtggggagacatacatactttggatgtacgtacgtgctaggagaggagggacctagggagaggtgtggacgtaccgcgtacgtgacatttttttttacatatatagatctaatggtgcataaagtgaaaatcaatggtaggatgttttccttttttttcttggaatttcttagatttctctaatttattagagcgccacgtagcagcttagaagtgattgtaggagtcacatggcagcttaagagcgtttctaaaaagtttaatggaattactcatacgaagtctatttgtagacattttttttcataaagatagaaaaagaagaaagaaacaaagggaaaaaagagaagggaagatagggatcgtacacaatacgtgcatactgcacgtaggtagggacggcgggagttttttttctttaaagataatctaacgatctaaaataatcggtccacctatttaagtgaaaatcgatggtcagatttatctattttattagagtgccacgtggcgactcaagaatatttttaggatgccacgtggcggcttgagagcgtttgtagtttgtagaaagtttaatggacttttagtatataaaatagatagatagatagatagatagatttttatgaatataatgatgtaaagtgtgcgtcttttttcatacgaagagcattttgtaaaagtctcacttgttttagttactctagatcatctttagcaaaataatctgaagcgttttgaactacggccgggagtaccacacgaaattaattatctgatctttcgtttttgctagtactaattagatgtgctttggagggccttcatcatatcgcagtatatatacaagtgttgcttcggtggtgtatgaggataaggattgcttgtcgttgttgctagctgcaacatgatttcttaatattcccaagctctacaaatctatgaatctatatattgataacatttaaataaatcattttgtgttcattttagatgaaatttaaaattttaaactaatataatttaacaagcgaacttcaaatctattttgaatctgagatctagagttgtgccaaacaaaaccttaagtaatgtaattgtttcaatatcaataaagctttctttataaaaaaatagctgtgcttagtttggacttactagttggatgtttgtctaagaaataggaaccaagatccccatcttcaactgctcggggcacatctgctagtcgcccctatgcagggacccccatgtgttgagctcgggcacatatgccactcatcccacggagatgggctgtgcttggggcacatctgtcaccaagcacgccccctgtgggctaagctcagggcacatctgccactcgtccccgtatatgggcccccatgggctaagctcggggcacatcggtaccaaacaccggcccctcgtgggctgtgctcggggcatatctgccactcgagctcgggcccccatgggttatactcgggacacatttgccacctttcccccatatgcttgaggtagcagcaaagcgttgacccaatcaagccttgcattcaatgtgaagcgatgtataccaacccagcatacgtctgggacaaagggtgacaagacggcgcacgctgaccctaggacaagccatcatcactcctaaaaaggcaaggagcgtgggctgttagatagcatggttgtttgacttgttgcctgtctcggcccactgcagtgcggccccacgtacctctgaggttggcaagtgggcttgacaactactagggtgttcatgtcacctatcctaagccacatgtcgaaggaaggagaaaggggtagagagaagccactctacatccccaacacgattgacacacaagttcagggcgagagtgggtcctgccaactgtcatgcgacaagactaagcataccaacccctgtgagcggggtcgcacttgtgtacacatgcatgagcactgcggtatcctttgacatataaaaggaggaccaagaccactgagaaaaggattcggctttagttagattctaggcataatactgtgaagacggattcattctctcccacttagaacaatattgaaaaactcattgcaaacttgatcatgtagagcaagaacatatgagtatggtattacacttccgagcggctcgaacttgtattcatcatcagacatcagtcaacgtcctctctcgcgttccgaatacgagctctggtacttgcaccctgaccaaactttcgagggagggtattttacctttctgctttccactagaagagcttcttgctgcaacaatatatatcatatgcatggtaatggattactaataatttgcactcaacatgaacaggctaggaattaggttcgagtataaaggatatatagaatgtgacctatgcgattatctcattctttaaaccaaacggtaccctcagcagatcgcggatcatcttggccaacttaatgaatgagcttatgtcgagtgtctgtcgtttttcttaattagttaagcaatagattgataatagtgacagagctagctagctgcttttgaatctttcgtttgttttgatttgggatggctcgtggctgcatagtgacgtcccttcaatgccaccattagccaactaatgagttaacttgtccataaatctgacaccctattggcaggcgatgcatcataatatgtacttgatatgatagtatattattatactagctactaatagtaatagtcactaattggatctgtaagattcgcatatatatatatacatcttcatgtgaatgatacacatcatatcagcatatgttcgactcgatcgtatatatattacaatttttttcttaaacactctagtacagtaatagtagttggcctttctagctaggtatgattcaagcttgcattgaggtcttgccaaccactcttaatctaattacagatgttgtgcctaaacatatacacttattaacttgaaccggcaataatatacaccacttctggcgatagataaaattcctactacactgtgtttgtggatacggctgatatgagaatacaaatgaaggtgtggcgagagagagagaggagacactagtacaataacgatttttctgtgcggtcaaaagcggttttcgcgtgcggatcttccctccgtctggaacgaagtgtctgcgaaaatctgattttttccgtgtgggtgacgcacccgtgatttttgcgtgcgggtgcttaagccgcccacacgagaaaataaaaaatcgaaacaaaaaaaaagaaaatcaaaagccgccctggaaccctaatccagctgctaccgccggcttgcccgaggtccgctgccgtcgtccctgcggtcgctagcgacggatccagatgcccgaggctgggagctagagaccgctgccgccaccgcgctgcccgaggcacgccgccgctgtccccatggtcgccggcgacagatccgccctccccgtggtggtaggcaacggatctaccctccccgcggtggccggcgacggatccgccctccccgtggtgccggcgacaaatctgctccaccgccaccaccctagccgataccgccgccgcactcgccgccaccgccgccctagctgaggccgccgctgtcgccgggaatgggtggggccgaggtgagggggaatgggagggggagagggagagggagatgggaggagtgggaggagagatgggaggatgggagggagagggagtgggagtggccgagtgggaggatgggaggagatcgagtggcgctgggagctaaaagggtgggtgggctattttcgcgtgcgggtcacttaacaggtccacaagtgaaaataagcatattttcatgtacggatctcttgtctacgaaaattgattttttcatgcggtcattttaaagagccacacgagaaaatggagcacgatttttgcaatctaaagtgagtcccgtatagaaaaatcatttatgtaatagtgagacatagatttttatgagaccaataacttggcactccttagtacaataattcaaagctaatcttgaactttggacacaaatttatggtttataggtcttctccaacacttctattgcgtaactttagccttttcatgattgctatagagacaagtaaaaataatctaaaggaattttcgtcaaatcaaactttaaaattaaaagcccctcaaaattgcaatccaaaatctttgatcgacagacctggttcctggttcttttttctaaatgacctacacaagataatactgtgaagtttcatattacaagaccataactctggcaggctataatcaggaactgaaaaaaaaaagaaacaaaccatgcctcgtgcctacaacatgaacgaccactgttggggaacgacaaggagcatgacaactcgatcggcgcactcaactctattcataccattgggttggagagggagaagacgagagagatggatccactctcccccacacaagcccaccaacatagctatcttgtggtggctagaggcgccaccgcaagaggacaatctatttgaagaggagattgttaggaaatgaatcttcaaacgatgtctctagggacgttgcgacatcgatggcaccaccatcgcccaccttagagagtgaagatatagttttcacccaaagcgttccagcatgaaaaggagaagagatgccacggcaatgctcccaagagggtggggcactaaaaagcattgccactgccggcccggaaatgggctgtgctttcacccggaaatcttctctctctctctctcttgtcattacatccatgtcgtttccaactgccaccgccatccaagccccttcagcacacaacaatcaccacaaacgctggccggcctcctcgccactccctacacgatctctaccaccgttgcctcggggggaacgcctctaactcactactgtccttctcagttattgcaccttgccacaattgtcaccccaagtgctacctcttttcccacactagatctgaggtagcacagggggttgcaccccgctagctgtaatcctagctttgccactcggtttctggtgggttgctctgatggcagtggcggctaggctttttgccgccacccgagtcaccagcacggggtgaggcaggggttgttactttacctctgtgtgctgaacatactaggtgttgcaattcgtttttggttctatttaatccacatggtcccatatatattatccacgatacacacaacaatttataatctacttaaagctgtgttcttttgtccatgttcccaacttctacctgctcgtttgtcgcgcgcacgcttcccgaattattgctaagtactccctccatctacttttaatagttatatttcatcttggcacaaaaatcaaagataaataattatacttattatccatttaaacatgctactagttattcctcgtaaacaattaagcgattcattaatatttactttctcgatgcccatgtagccaatcttgtgtggaaaaatggtgagtcacgcattaaatccgagaaaatcattaagatgataagttgttggattgaaatatgcctatcaaaaataaatttttcagatttgaaaatatgactatcaaaaatagatggagggagtaatgtatttttccaaaaataattcaatagaaaagttgcttaaaaattatattaacctattttttaagtttttaaagttaacatttaattaaccatgcattaatttatcgtttcgttttctgtacctaggagggaggggttcccagctctcaccttagaacatactaacccatttgtttgtgtcatggggctggaattaatactttcttagttattgagaagatcaaatctttttttttaccttaaaaggttaatttgaacacatcagtcactcagtcaggaacgaaagatctatgaaacgaaattgcttaggtggctctgtcgaaaagtgaaatgccaaacacatctagtgaagaagactttcgggcgccatatatatatatatagtatggaccgcgtggcttaatggagttgtgttgtgttgttaattagctaggcttgtcaagcaagaactacttttgactttttcatatatattgacaaaagtcaaggttgctggccagaaaactaaactaaattaaaacctggactgatcatggacagagtgaggtaattaactaggtatttagtgcattgctcattataacacataattatcatgaacagttgcatacataagatgtggaattcattaattatctactgaataaaataattaattgtgaagctatatctatatatgccgtgcatcttgcctttgaattcaactgctacaaattaaattgacaaatcaacgggccgccgggtaattgtcgtcttctgatggaagattaattgtttacttttcatgtgaactgaagagggttttggtcaaataaaacttagctaataaactaactttcaaatagatcgatctgcacatgtgggtttacacttttttatacttaactttggtacagttcctgtactagctagctagtgccaaaacatgggaagaccgacagtagatatgcagcaaaataatatttttgaaagattagttaagcataaagctagctataggataagcctgcatatgcgtcactgatttcctgatcagtttaggcctaattacacttatattagtaactgggcggatacatgcatgcatgtaatgatgcaacgggccatttcgcttaggaagttagctccctggcttccacgcgtcggtgaatcatccggcaggcggctggtacgccacgagcgcctctcaggctctcactatcctctagggcacaacaacaatattatcttcgccaccggattcaattattttaatcaaacgccactttttataagaacattgctaagcacgctagctagatcagtatcattatattctaattaattaattaattaattacctgtgatgtgatcttttttctcataatacatacggttttatttgatctaatgaattgtttggatttgatggctggacatcccattctagggcagtagggcttgtttcactggataccacactttaccatggcaaatattagccatgataattttttagcgactgcttggttcattgttacaattatggtttgtcagtagggacgaatacaattaaaaatagccccaactattttcgtaaccattatcttaaagtagaataaaaaaaaagcaaagctgaaaatggaaacagaatcggaaatattgaaagaaaaggggaaacaaaactatattgatggaaacatatcagtatcgaaaattagcactaaatgttggaaatattaaactataaaattcacatatttgacttagtataactatataatatgaaaaaaaataaataaattcaacactacaatagttaaatgccatgcactcaagttaaagattattagattgagtagttgaagagcatgtaaactacatatcaaatagagacatggaccatatatattgtggtatagaaatacaataattaccatattttaaaagcagaaattttccaaagaatatggtaaattacgaaaacggtcagtgtaacagtaaaattgtttccgtttaattccatgttttttttaccatttctattttcattctcatcggttaacattttcacatggctcagctggtagagatcggaaactattgatgattagtcaggaattttcattactcgtttctttgctaaaccttgctacgtgtgtactagattggtagccacacttagtcgtggcaaagttcagtaaataaatgtggttatgtcacgccccgaactagtcccgaccggaactagcccgtgacgctccaaattaacctgttaatcgataccagtcccaggaaacagtgctggtatcacagggagacagaatatcatagcaacagaggtctctttattatagagtagatgtacagtcatgttgggctgcggacagatcccgagcttacaactgcattacaaaaggaaagcggaagccaggacttggaccaatcaacacaggcgcgacttgggaactaggccgaaaccctaaaactcatcgtagtcggcttgcttctggaagaactcctcatcagcaggatccgcttcatcttcttcagcaactggggggggattatttatatagagcaagggtgagtacgggagtactcagcaagccatgggaagtaagtgtttaatgcaggcttcaaggaaaggctggtgtttttgcaattaattttatttgaactcttttctgaaacaactaagtgagtgcttctcaaacgacacggatgagacagtacgtctcgtccggtcggagtatgtgcaatgtatcagtctttagaatttaaacaaggttggtacccggccaacagctttttcaacggccacccgggccaacaacttttcaaacggccacccgggcctagctgatcccatcagctgcagatttttcaaacaccgaaccccttttcacacagcaatttcacaagcagtagtcaaaccaaactacgctaggaatcacctcacatccgcccatgaccgtgggcacggctgttcgaacagtttgttaacctctgcagatggggtacactttacccacacgacattactaacccggatcacccagcccgtggggatcagccacgtcgggagacctccaagctttcatgacaaggcatttccaaagccgacacaggtttaccatatgccgacgagaggggtcccagaccaacaacaggttaggtcccagaccatactgtgccaggaagcccaggggtcctccccgacaccaccccggcgaatccacatgtctctcggcatcaaggctcccctgataagctagttactcagccaggggtgtcccattccacccatgtggtcgtacttgtcttatgtttggatgaaattccaaggaatcggtccttaagtgcgagagcgggaaaccgtacacccggtacgttccccggtccgcggttttggaaattcatttagttcgcaagcaccgacccaggtgtcgggttttccaagtcttttgtaaaactccagttttacccaagttgttactcagattttaagtttgaaggcgaccgtcgatactggcacagggtgcacgaatatcgaggcgcaactggatggttacaaggggacatggtatagcaattaacaatggaaggatcaaatgcaacaagttaggtaggtctgccaatctgccttgcagacggaacaacagattaagtgcaatcctatcaatgcataatattttgcaagcaatataattatatttcaaatataggctcaagatgttcaaaggtggcttgccttgctcgagatctggagcttgatcctcgaaatcctcgcactgcgggtcttcgggctccgaaactacacgcaaaacgggacaactcaacaaacggcgaaaataaagccctattaatgacctctaagcgtgccattagatagatctcgagatttgagaaattttggaatttgaacggagtcaaacggatttacggttggaaagatattgaatttctaagattattggatttttggtctaaaggaaaaggatttaattaaatccctttttttttggaaaagaaaagaaaagaaaaggggagagggagggaatatagacttccctcgggcggctagggcgcggcccaagagaaagggcggctcggccgagcttaacgggccagccggcccaagaaggtggcccagagcggcccaagacgcgcgcgcgcgggagggaggagagagagagccggtggaccgggctcaccatgcgcggtcccgggtgggacccgcttgtcagcggctcggctcaccgtgcggagggagtacgcggctcatgcgcgcgggcgggggagggacgcagtgcacgcgcgcggttcgcggtggacgcggatgcagcgggcccacgcgcagcctcacggctcgcggtggaacgcgcgcacggggagggactgaccggtatcggctcgacccggtctaggctgagctggcgccgacgtggcgcctacgtggctgccacgcgggccggcgggaggtagacgacgacccggccgcgaatggacggctggcggcggcggcgagcggcggagcgaaccacagcgatacgggcaaaagctagcacaccgggcggttgttcgtgatgaggggagacgagccaatggctcggattcgccagagggagttcgacggcggcgaatcgcggcggcgacaaccggcggggagggaagagggaaacgccgacgaggtcacgagggaccgattcccggcggtgagagcatctacgcggtttcgggaactcgatgctagcgtcggattggacggagctacgccgagcgaggctggcgacgtgtgggtgctacggagctcgagcggcgacggcggcgagcacacggcgagcgacggcaacggtcggggcggcgccggctaactacggggagtctactcgagctactaccgaaagctagggggaggagatggagcgaggaggaagaacggagggaggcatcaccgagatgaggaggggcgctgtgacgagaggccgacggcgcgggagtaatctctccggcctcgggccggggaagaggaaggagagggtgcggccgaagtccccttccgcgtccttgctcgtgccgactccttcgacacgcgcaacaacgaacggcgacggcgaacagagcacgggggcggcagctatggcgaggaggcgaaaacgagggagattggaggggaaggagctggggtttaaagggggcggcaatgtcggtttgggaaccgacttagggcggtcaaggcgcgagctggcgctcggcggtcgcggccaaagcggcgacagggaggatgacgccggcgggggaaaaaggggaaaaaggagggggagaaaggggcttgcccttttgccgattcgggaaaaaggaggaggggagcgggggcgacgcggcagagggaggaggggcgctgcctccgtcccttggcggcttgcgcgtggagtggcgggggccgggcggtgacgacggcaatgacggcggggcggtttggagcggcgcgacgacacgagcgacaggcgcggcaggcgctgacgatggcggcgaccaggcggtcggccactcggcacgcgcgcgcggctcgcaacgggagggcgtggcggatggagcggcgcggctcggcacacgcgctggctgcggggccgagcggctgcaggcgcggcagggcagcggggccgggcggcgaccacgcggtgcgggcgaggaccacgcgggcgcgcgcgcgaacaacagcgcgcgggggccggctttgcgagcggggagctcgctagggagaggagaaggaaagcgaggggaggaggcgctcggcgcggtgactcacgcgcacgcgcgcggacagagcggaggaggaggagcgctcggcgcggctcccgcgcacgcgcgcgcggcgcgcgggcggagcggagcggagctgagggagaggggagagggagcgcgccgggaaggggagggggcgagagagagcgagagagagggagagagagcgggaggaaatcggcccatcgacccccgggggaggcaaaatagacttttgcggaggaatttgatttggaaggatttggattcggatttgaactcgacgatagatcggggattgagatcttgagatggcacggacactagacaacaagcaaagaaacaaatttcgcaattagggtttttaagagataattttcccgctaggcgccacgacggaacgggcgctacagggtgtgttccttctccaaatatgcccttaatgttcagttttatttggcaactaattaaaccaagcatatatatactacctccggccagttttatttgtggttttggacaaactatattgataaagaatatgttgatagtactttatgcttgcctatggacaagtatttgtggtagtcaaaagtatgacattggaatacctcgctcaccgttgaacacaaccgtgagttagctgaccagactcatccgtgacccacacaaactataggttccatgaattaattccgatgccctttgccatctgcatacgcttcctactttatcttaaagaaattccatagtttaccaataggctctcttacttgaaaaaataggtcttttttttcgatttctattgagtagaggtttttctttttgttttctttttctggatttgtatgccatgcattctcccactgttctttttagtatcgttgatgattaatctccaaaaatatatcttttaccattattttctaatcatttgtttgtaggagttactaaaagtttactaatatcattctcatatatacatcaaatcttaattaaatgaatgaatttctatattgtcgatttaagtttttgatatctgattatgtgaatgccaaaatgacatctactaaaatctcaaacattggtgaggatgagacatcatctagtacaacgaatctggataaatagctagctcatgtctcatcctcactaaggttgttttttttgggacaaatggagtatttgtgaacgaaagaaggccaagcatgcacttaatcaccacctttcgtgcgtgcaacgatttttctcttggctctagctaacctaagccgggacacttttaacaggccttttaaatggcatccagccataaattaaactaatcgccaatatcaggcagcagccaattgggcgctgtctcctctttcctctcttccccctcccccttgcgtttcattgctaaataaagcaagtcgctggcaatttgaggaaagtccacccataccctgcaagttgcatccaccaccagaaaaagcctctcccgcaaacgccacacaccaaaccacaattaatcccatcaaattcccctataagctttggcctctttgcagctttcttctaccagctcccagctagatcccctcttgccttctttggcacattcgttcttgctctctgctgtggattatttgcctccggctccggccaatcggcggcgtggcgcgggcagatcgatcgatctcatcggcggcggggattgcctgttctagctatagcttgatagcttagctagcttggtcatttctggtgagagatcgatcgagatagcggcgaagaagatggggagggggaagattgtgatccgccggatcgacaactcgacgagccggcaggtgacgttctcgaagcggaggaacgggatcttcaagaaggccaaggagctggccatcctctgcgacgccgaggtcggcctcatgatcttctccagcaccggccgcctctacgagtactccagcaccaggtctgttctgttcttcatatcatcgatcatccgtcctctctccttgcttgcttgttgcttgttgatgattaacttttgcttgaagataatatttgttattgattcttgttcttttcctgcgcttagctttttctgctttaatttcctagtattttgatatttagccagggagccagcatgggccatggccagctcttctctgtgcagtcagaaagatgcataaactatgcaaaaactgccctcttattgagaaaagaaataaactatgcaaaaaccgtatatagacattcatgcacctaactaaaaaatggttatcacatatatataagagctgcacggagtaatgattatatatgtttttgtctttatttttcttttgaaggagatctgtatgtgtagttcttctatctaatttatcttttgttttgcatatgtatattttttttcttccttgttcttgactactaattaattaattaattgcaaaactaaacattgtctttggtttgtattaatttgtatattacttggccgtacgttatcatgtgatcaacatatatgcattgcagaaaccatcaaatgaaagaatatgtggtgaatggcagctaaaaaaatgatctagggtttcgtgataatatgaagtgtatagtgtgtgtctctaaatgaaaatttgtattacttcgatctctcagctgtgaataattgcgtgggtctatacatctcaactaccaattaggaggtgtgttagatggatgcttatttcttggtcaaaaaataacacataaaaatcacatgattcacatatatgatgtgtaatcttaattaacagattaaattttgttacttaccgttatatatatgcaaatatgcagcatgaagtcagttatagatcggtatggcaagtccaaggatgagcagcaagccgtcgcaaatcccaactcggagcttaaggtttggttcccaagattgattattacaatttatacagtttgattattctcagatttaagtgagaaatatatccactctaaaaaaaattagatcatcctgaaagcaaatgccacagtggagtttagaagtaatacttagcaagctagcttgcatgcatcatagctcgaataatcacacactatatatttccattttgtccgccatatataggttcctaacttccaattacatatagacacagtagaacaccatttgttttaaatatagtccttgcgcaggagtgttgccattcgtataagtttcattaatttcaagggaaatatgtgtctcttttatggtaaattttggggagtggggccatggggggagtatgtagcacactgaattttgatgaaataataacaagaataaaattatttgatcttttaatagatataggtgcacatattatttttgtgtgtgctagctttagatatttacaccattgcaacataaatatatattgcatatgtctcctggcaaactaattaaattgtctaaacacaatgttaatctacttatgttctatgtctatccaaaatgaccaacctctgattgagtatatatatacatggatagttcccaaaaaattgcaagtctgtttgtacacatttgttatggaaataataaactaagcaactaaataaacttaataatacattatcaactaaagaaatatcaaccatatatacgtaagacaatctatattatgcaaacaaataaagcaagcaaataatcaactgcataagatgaccatatctttcttggcaattaacagcgtggttttcataatgagtatattttaatcttagagattttatgactgatatgacttgattcatcttagcgtacttcacaccttatataatccctttttccattgtagtgtattgtacagttttgttctgtgttatccaaaataatcaccttgccctagtgacgtatgaaaattgcctaacagttcaactttagttttagatttgtgaagaatgaaactaagtatctaattaagattaaaacatagataaaccaaacatggagcattgcatgaataattaaaacaaccttccttataaataaagtcattgtggtttgtcagcattttgattctaatctacctatattaattaaggaagtcgatcttacatgtagtctttgattagcgtggagctatcaatcctcgtggtcaatttttaatgcatggttgatatcatcttatatctttgatatcctactcaatgaaatctgataagacgaaaaaaatcaccaacaaattcacatgggataggggccaagacgattaaacgtacctttcgcatgagagaaaaacacattgtttatgatgtttatatagatcctgatgggcctgataaggtctggaaaaaaaagaactgggagtaaaaatgatctttaagatcacttaagattaatggtaaacatagataaaccaaacatggatataaacatcataacatgccgttgggcttgttaaccgatcatctttagtactggtttataattggtctgaaagatttatgatttgcctgaccgagtaaagatcggttctccagtagtaacttaaggacacgatcgcgaagtcagggaaattgaagtaataaaaagaagaatgattcatcatgttttgtttgaatatcgattttacaaccagtcctgattcctgaaaattataacttcattttaaaataaaattggatttgaaaaagttgattaacaaggatttatttggaaggagataagttaaaatcccagtaagaaggtgaaagttttattgtagtattatgtgagtcacaagctagtaatcatgctggttttaatcttcacaatcagtacattctgaaattcatgttaatttaaacattttcatacaatttgttccaatcgaaaagtaatatctactcagagcttcagttgagaataatttgaaacaaaatcaagcatatggtgtcaaaagaggtaaattcgggacttaggccctgtttctttcagcttgggattattataatccagattattgggagtaagctgaaagaaacagacaacttattgaaatagcttattataatctgaagcccagcttattataatctgataagctcatttaggtgagctttttccaaattattgggtgaaaaattactaccatgctaccccactccctctatagacttgcgaacccaataatctagactctaataatttaggaaagaaacaactaacggcttattctactatagattataataatctagtttatagtaatctgacttaatcatttagattataataattttaaactaaaagaaacagggccttaattaaggaagaagtgggcaaataaagaagctctgaccaaagccctacagggccacatacctagtacgaggtagttgggtcaaacaagtaaccaaattatatcttttagataaagaaacaagtaaccaaattatagttgtttaagacccatcaaacaagatgtaagtaagtagtatttgccttgggctgggtttttaggatgtcaatacagacttaccttgggctgggttgagtagtcgcaagtgcaacgggctgaaataaatttagggctttcagacttttgacccacctcaaattggcatgactctgtatctatcaaaaattgacttgacaggaaaaataaaagaacagatctccaccaaaatggaatcatgtactcgatacttacaaagagatgtgcattacaatcacatgcaaacttgggtagaaattatgaagaccagagtggcagctcatgtttttccacttaaacagaaatgaggagtaagtcctcctgtttgctcaactattcagagaagatacaaggagaacaacacaaaaaaaaataaaaataaaaatagaaatagaaagttcacagtacatgcaaaagaatagctaatcttttaacaaagaaccctgttttgcaccatcttagcagcggtttttatgtggtcagtacggcagtcaatagtcaatgaattacacccctgcaatctaagagtaacaaacattcaaagaaaatgtcatgtgccttttttgtccgcaaaggtgaatgctgaacatgtgaggatacaaaaatagtgaaatactacatccgttcaaaaatgttactaactactacagaaagaaatattttataggactatgaatctagacaggaaatgtccaggttatattttgggacataggtggttcagtagtaaactacatactcaagaaagcacctaggcactggttttcctttctcaaatagtaatccctacaaaccttgcattctgctgaataggtcaaccaaggtttaagacactaactaggattctaggaatgcactaggtagcatgttaacagcagaaattaacttcataaaagctggaatttttcatttgcttgagaacagtcatacacatctttttccttccaaaagtaaacatatattattcagtctcatttgatttacaaaagtacaaagctgagtagcatgggacaatgaacgttccgctaccaaagcacaggtgacaggaaaattatagtgctattctgatgaacaatcaactccaaaatttacaggatcactcactgggcattcctagagaaattcatgcaaacctacaaaacaaagaaaccaaggatcaagccatgaaactaacataatgcatttagaaattcataattcactactaagaattgtgactggcctcatgatcaactcaaaattgcccttccaagcaagcatgtcatgggtaataagagaaacattcagcagtggaagccaatacacaatgtagagacgacgtaatctgatcagagtaaacaacaatagatgatcaggatggactaaacagtttacatgtgcagccttcattataagaacactaggaacaattttcatacatattagatgtttgacttccttaccagactttactcatctagcaccttaccagactttactcaccttgctagatgttcatatgttgatgagttcatttgcaattgcctggtggcactagcatccatggaaataaatatatttttgttaatcaaaagatttagaagaaccattaagataatgtcaaccttgtcaaaacatgtacctgcctccatctagttttcatattataactgttgtaagcatcatgcttcaatattatctcatgccacaagagttttgttattaatcattgtgtttgttggtcagacatgtttattactttaattttgtcttgtgtgcctgtaattgaataactctaccctgctttctcacttgatagttttggcaaagggaggcagcaagcttgagacaacaactgcacaacttgcaagaaaatcatcggtatggtctgaaaaaccctgcaaaatttccaagcatattattcattagaaacttgttggaaagagaagcgctagcatgtactatctgaaaccagcaagatagtaataaagacaaaagccaagaatcaatgccctacaagtaagcattatcatgtgcaagattacaagcacctaccaatcaacccaaatacctgagacaacaaggatactattaaacacaaataaaccaaatcagaactactctgctgtgaactcagtttccagttctaagaaaaaaaaaatagatcctccatatcagtctatagatcagtcctatactcctattggtcagtattggtatcgctccctattgtatggtgcatattgatcccataaatgactagaaactattgaaaggccattgatttcacacgcaagcatagagaacaagatattgcgaagccataattgctactaataacaagacaagaaaaaggtatcacatattggtttgctattataggcagttgatgggcgaagatctatctgggctgaatgttaaggaattgcaatctctagagaatcagctggaaataagtctacgtagtgtccgtacaaagaaggtcaacccacttatcatatttctcgttatgcattgatcatttataaaataaacttaactgacatggtgttactgttactgctgctgttttcaggaccacgtcttgattgatgaaattcatgaactgaatcggaaggtctctatagcattttagtttttgtaatcctccatgaaggatgtttattattattattattactttagtatactgactctacttggttgcagggaagtctagttcaccaagaaaacatggaattatacaagaagatcagtttaattcgtcaagaaaatgctgagttatataagaaggtagccagcatgttagataaagaaaacatagtgttgccacctaacctgcttagcacatactgacttatattgtaacaatgttttagatctacgagactgaaggaccaagtgaagtcaatcgggattcaccaactccttacaattttgcagtaattgaaaaaacaaatgttcctgtgcaacttggactcagcacactaccacaacatagtgacgccgaacaatcaactgctcctaagctagggtaacacttagctctacgtattttcagtccatttgcaaatccaatcttcattggagtaacgaatgttcaaacacatgcaggttacagttgaatccatgaccagaaaaacattgttttgctacacccttgtatgctgaagggatactatttgctgtcaagagttgatactcagatcaagaaaaaaaaaactattcatgccatagtgattgagaaatggacttgtatactggaaataaatgccacagtggaattgagttgtggaatccaggcaatgagtgttttatgattcaatttttccatgtatttttcatatattaaccagtgcgggcttgtgtaaaaaatataaccaggcaaggaaaattagctgtattgtgcatatggagcaaatttcaggcgttactaccattaaaatcatgacatgctgtaagcaaatatcttgtagacctttatctacatagatttttttcagtaggggcctccctaccgtttcaaaagaaaaagaatgcagatgattgatatttcgaatgccttcagacatggataattcataactattgcgatgtggaaccttcttaattttcaatttttaacacgctatctacaagtggaatatcataatcatttgcttgtcttcattagtaagacaagtttgaatgcacgtgccaatgtgagacaaccgtaccatataacggccattagtgctagattggctttgcaccatgaaaacattggttttacaacctactgtgaggacattaaaagcagagatactctagctggcctgtttggagataaacagtcgagaaatattgtgaagacaatcaaagtgtttattcctgggatgcagtccaatcccaaatgatggatccagaacaaagaaaatataccttccatatgcctatgtggggctagaaagcccaagtgcccaacaaaagcaagggtccagtaatccctaatcccagaagtattgagggcttttgagtgaaatccagcacatgcgggccaatatcctaccagaatggctcaagcaagggttctggtcatattgcaagacagcccagaaagctttgaggtttgagctaagaaaaaaaatatttatacatgcaggaattgccctagagggatggcccagaaagcttcgagctaagaaagaaaaaatatctaccaagaaaaactgtctagagttattattcaagcttcatacatgtacatactgaaatcagtggcaaatctaggataaaaattgaggtgcttatgtaatttgcattgataggtcaaaatatgaaaaattgatacatattccaattagcgcaccaaaatctaaaataattcataaagcagagatgtgaccacctaatcaaattataaattaattctatccttggacgtagaaaaagagtaaccatggtaacaattgcaccacaagcccataaccaacaggtactagtcttctagaagctatgtaaacccatcaattacagaagccatgatctaatcccatcacccattggcccttgccatttttgctgtactgtacgtaggcactaggcagtaggctactagcgcccagactagccacaatcgtggattcaccctgactgaaatttcagtggcacccaacaaaatccacagttgggcatcaactaacaaggttaacacatctacaacagcgtggatataaaaatacatgatcttatagataaatttctataattttcaagaatcggttataagatgaatctacatcaatcccagtaacatttctaattaaaacaaatctttactgcttcaagagttagtggttgcaatgagccgttttgtactcatctcctctcttcaaaggtgtgagagtcatctttgcaaaagcatggctacatccattgcaattcatgaaaacatcactatccatcgaaaaacacatgcacttggctagttcaatacaaattaaaaacaaatatttgcacatgcacttggctaattcaatagaaatttaaaacaaatatttgctcattctgaaccttacaggatttttttaatggagagtgaattatggaggtacctaaagattttcttgcaagatgtgcagttgctgccacaagcttgtcaccatccccttgcatgaatctgtcataaagcagtagatcgaatttagagcaacattttgggagtggagctgaagtaactggaactagtagatgtaacagatcagcacaatcgcaaagaataactagatgccatgtagtattggctcacaccaaaaactgtactcttatcaattaaaaaaactgctgttctttcgtgttaatatagctgagtttgccatggaagcagtgaaccatgcattcatactgattttgcacatacaataaaaggacctccacagagaagaaacatatgaatgcttcctcgctctatctaatcatagagaggaaaactctcaaagtaaagccatacgggtaatttggaaaacaatcatagtttcatcttcctcattaaaacagtaacatatgcatgcatctgcctgatagcctagcgaaaattgaacaagatccagcccaataattgaattttctaaaacatgcaggcaaatttcaccgttttctaaaaggaatttatgatttagatctactgcgtcctacagtttagcaaaaacacatcaaactcctaagaccaattcttcaaatgcgcgcaggttcacaacttgttggcactataatgttagtatccaagggacaaagccattaacaaatctgttaccagagaaacatcacatggaaggatgatgttagaagggaagcggagactggagtttgtgttacatacttcttcttatagcactgaaatgtagctcctacatcgcattattattcaaacaaaagtggacacaatccaacaccactacttaatttgtaaatcctgcacagttttgtaaacaaaattcagaagttcccgacagaatcgtgcccttttaaatcaactgccactaatgcacgcaagctgatgaaccataatatattaccaccaaactttaagttgactataatttcctggcattgtggtctcactctccaaaaccccccataattccctcgagtgtctgcgcacgcaagcaaacagtcacagtatgacgtatgccctgatatgctaatactgtaccccgaagggcttttctagatccaaacggaaaaaatcgaaacacggcagaagcccgagcttctcacatcgtcctccaatgcaagctatagcaacggcacgtatacaagcataaaaacaagcacatgaacatacttttcactgaaagggaaaagctcggacgctcacctgagaaaccacgcgcgcgccgcaccggcaccgtcgaggggaggggacggcgggagctagcggagaaaggcattgcgatttaggtggtggctggggccggggccgggagagtggtcagggaggggaattcacgagatcggtgcggctgcgccgcgccgtcgcgcgcggcggtgccggcgatggcggctcaaaagggggaggagcgtgcgccggatctgggcggcggacgcggcgtgaggacggcgcgcgggcgcgcgcgcgcgcgggtgcccgtggcgcggcatgtggccgtggaagcgaagcaaaagccgcgacacatgttgctcccggcggagtagaggcgaagagatatctgagctggccgcgatccatcgatccatcgatctattaatgccgcgatatgtaggcgcctcgccgaaaatatctaggggatttccgcgattaaacaatgcggcggaaggagcgatccaccgagggccacgtcgcccaccccttcccccccttcacctcgggatgatgctgtgccgtccgtgaccgtcggatggaggaggtggaaggcacggatcttcgcgcgtgccgacacctgtcccggcgaggaagcgggttaacgggtccccgctccagagaagggtctacagaaatgatcgactgtacacacgtgtctagtggttactcaaaataaaagatttcgtcgggtggtggtagtgatccacttgtctgtgctctaggctagttgtacaagtagggacataagttttattatttttcgaaacatagcactaatacatgagcttgtataaagatacacatactagtgaatcttcctgtatcgcggaagctggattattacgggtcatatttggtctttaggttattctttttaatacacactcacacacatgattcttatgtgagtatctcagaaaactaaactggtatatcctgacattcataaaatcaccatatattactcgatattgataggtacgccgtctatcactggaaaaataattagctataaatacgaccactcctacttaaatataggattttaatcgggatgaacatgtcctatcaaagaaaaaactaatcatttgagggcatttttaaacaaaagaaacggttttagtacaaaaggcctttccagtacggtccatcactcacggacagtgttgctctggctaacacaaattctatttcccttactgcttaagattagaaaaaaagaacgggtacgtagcatcagtttctgctctgttaaatatgtccattggaatttctagtggcacctaatatagtattttgttgcaacatagtgcacgtgtctcacgacgtactacctctattttttattttttaatagatgacgccgttgactttttctcacatgtttaactattcgtcttattcaaaaattttatgcaaatgtataagatataaatcacacttaaagtactatgagtgataaaacaactcacaacaaaataaattataattacgtaaatttttttgaataaaacgaatggtcaaacgtgtgagaaaaagtcaacagcgtcatctattaaaaaacggagagagtagtaatctttttgttatttagattctttttgctatattttatttaagaaagtaaactcatactccttgcaaacctataaaagcttatgcttatcatagggcaagttccactagttctcttgcatgtccgaactccgaaaaaccacctttcatgttgcaaaaagttttggatcaacaaacaaatatgttataaatttattctcggattcattatcgcaaacataaatatcgcattttctagataacttcattacgtaaaaaaaatatgaacaataactatcattttttatttacaattattttatcgttgtcaaatttgacataatagataaatgtccatacgaataaaaggaattactatattataatattctaaaataaataaaaatgttattttatgaaatatgttgcacatgttctacgtaggaaatattcaccttaattgggttttttatgcgtgactgtacagtttgatttttattgtttcttaatagagtaaattgtattggtggtatataaacttgtagtatgtaaacttgtaaattgtccgtttcagtacacgaacttgtttagttcgtgcgaacgaggaccaaaatatcattgcttggtttttttcatcttttttctactatcactatgtcatattctattttttattggagaagtgtacttctaatagccactttttcatatatatgtttacatagtatcctaatcagctcctgaatcaataagattagccatgtagtgtccttttcgccttcctccgcacgcaccatacaagttcatgcaccaaaacaagcattttacaagttcatgcactagattgcatccacctgacaagttcgtgtacgggcaatgcaatttactcttcttaatattaagaagttaaagagttgatttacacagtttttatacttgtataaaaccttcagtttagataataggtgatgtgagattcattgtcaccaacattttttcctttttaaagagtacaaacttttttttggaaaagtatagatatttctcttcttgattggttgatgagaggttgtggtgctgttggtgttctcattacccctacccaagtttatgacctcttaggctcaattttggtgcctaccgctttatatagccagaaggttttattttaacaaagggagtatgtattgaacatagggtaattttctttccagcttcaaccctgttcatatatatgtacagagaaattaattatgtcgctagaaagttattacatttctaattaacggcaataatgttgacacctattaacaattgttctttacctaattagagtagctcttaaagattcatcaagtgactttgattatccattaatcaccatgactcgcataaaaagtgtactatttagggtttaggatagctgaattaataaattatttgatttgtgtgatagctatttgagggtatgaatggatgaattaacttatataaagttcaaattttatttttataaagggattccatgatatattttttttcacgaaaagaaccatttagaaacttaggaagcgtgctaatgaaaaaccaaaatattgaacagaaaacatgtcttagggctggtttggtttgtgccttatcaatttttgtcaatgctaaattttgacaagttttggcatggctaattttggcaaggcaaagttgtgtttggattgaagccaaaatagtgtaagttaactattgaaattgcctattgaagatgcacttaaaccccctagtggattttggtgattaatgacaaggtggttaaagggaagtaacgtgtttatcaagtttagtcccaaagtatgttgtgatggctaagaatacatggagaccccccccaattcgaatgttcctaaatgcgagaagaaccgagtggttagactaggttttacactttcaaaattgagtttggggaaaaccgtactattaagaggggtttcaagtgtggttctagggtatacaaagtgctcttagtcatatccatgagtcaaaatatttttggaatcatttttgaaaaatgattttctccccgggacagagagggctacccggaggttctggccagaacttccgggtgccgtttaaaagcaaaaatttcctaagtgctgcttggaagttcctggcacttttgcccggaacctcctggcaggtttccagttcaaacttgtgagtaacggctagatgacgtcacctagccgttatatatatggatttcgtccccagctcaccctttggccattccacttcagttctttcatgttctagggttttctagcctctcctaagctccctttgcttcctccacttaaatctagagcctatcttgagagattgagagaatagatgagattgtaggagtgttttggagatggtttgaagattgggtttgattgaacactttggataccttgtgggccgtcacttgggcttattactcttggagatcttctcctagacggttaggagtcgcccgtgagcttccaaagatcttgtggatgtcccgggaaggtttgtgaaggttttcctcacctccgcaaggaaacgaggtaagtgagtaaagattcttgtgttgagttttcagaggttgtcctaggtagagcaacttgcatttgtggtcttttctagaaggaattgtgagttggatcttggtggtcactcaattctagaaaatgacctagaagtgttgagttgaaggctgtggacctcttctgggatctttgcataagtgaggcaaggggttaatcgagacccgactctttgcagcacctcaacggagagtaggatccgtgtgatccgaattttgggaaaaaaatctcctttgtctctcttgtgcatgttctttgattgtgtctgctggtatcgtgtgatctataacttgtgcatctctctgcctgaatttgccgctaggacctgtttttcttctcagatttcgattgtatctgttgcccggaagttcttggctcaagaactacgaaagttccgagctactcttcactgttcggaagttccagtattcattaccaggaggttctgggacttggtaaatttaaccgctgcgattgttgagaaaatttcaggaaagcccattcaacccccccccccctctaggctacatctctgcgcgttcacctattttcttaggcatgccaaaatttggcttcaaaccaaaatttggcatgcgaaaactaaactctattgaaattgccaaatattggtaaggccaatttaggcctcaaaccaaaccagcccttaaactcccttgtaacaccgtgtcctcataagaggtcaattgatattggttaatattaagctcacattcataacataatgatttatttcgccattatgaatacatagtacaaaaactaaatacaacctagcataatccattataattatgtaatcaactctctgttctagtttaaacggaaacaagtataggaaaaactcaacccgcagtggtggattcttctctccacatcccaccttcaatttgttttatgttattaacaaaataaattgttatccatatctgacttaataggtggcaaagaggtagcgctagagcggtcatgatcaccttagcaaatcgtcttagttgacttagatacgacgcttcctcgtgcatgtgggagtcaaagatgcatgcatgcgttgtttagagggccagagagatatctttggagactttgtttattaaaaaaattagattgatggtttaaaatattgggttcatcatcggtttacgtggaatcagtgggtatcgattcatggttttagtgtaaattagttaatatggatcttaaattgttaatttattgagtatataatataatggtgtagtacattatttgaaaataatagtccaaactaattagtcccctaatttaaatgaagactatattacattattattaatttagtgggtaaatataatggtgcaaactttattaataaacattttagagctaattaggttatgcatttttagaaaaattatatgatgatataatatttatgaaagtatgattatttaaaaaaatttatcactaataataagtgtatccatgaaaaaaagaaaaaaagtacgtatgtaactacctatgtgcgtacctatgcaacaggaggagagatcgaggtggagccgaattttcccatctaagcacatgtgccccctaatttcaaatgtgagcatgtattgtccagagttctatttctaatcgaattagctagtacaaagcaaatgatccaccaacatgtattcctaatatttcaattacagtaccatgtttttttctctcattgctgatgccgcttctatgtaaaacaaattaatatttgttagcacaaattatgattttgatgatccaagcaaatgggttagatttgagcttactgttgtagttccaatttccaaaacgaaaactcaagactgacggcatgatggcagggtgccctatctcgtaatggttgacctaatcaattgctaattgtatttgggttttctttttcaacaacaaacagtgtcaagtaggcttaataaacaagctgctacgagcaagtgatttgtcataacgatcagcagcccatcagtctgttatattttgttgcaagtccgatgggacgaccactgcacacacacgcgagcttttgattagaaacaaaattgaattagacggttgcatgtgctttagatgggaaaattttggggaatgcatggctggtcttcgacacaaacaaccggatccccttttaattatttggtagagccaattctttagtaggattagagttcatattatctagttgggttgctagcaatatcctcaattgatacatggtgaataaagtttcagagtgttgccaaattgaatattgggtattttccaatgatttggctccactttaaatcacactactatttaaagttgtcgaataattcgtttggtaaatttcggtttagttccaccgcggtcaaaaaaaaaagttgaggattaggctttcaatgcaaaaaaaaaaagtttattttgcatcactctgtttatcccaaatcccaaaataaatttatttttcagtagtcattgcatcgggataaatgcaacgagagtagatagaatagaaaataattacgtcgggatttaataaagttgggtcattctagattcttttattggtatatgtgggatggatgaaaataaagttattttaggtcgaaaggagtacacgataaatagatgcttgtccaacaccaaattgatcatctcacgggaccaggggtgcacaaatagtggaaatttgtattatactgaattcggaaatcatttctatgtgccatggtttacgaaacagcatacacatcaagaaatgaaaattgcacatacatgcatacatattacaactacctgctggtaggtttatataaaaaggaaccgagggaaaccaacaagaacaagttccccatctgctaagcctggctatgtgatctacgaaccatcaaattcttcttgcaatttgcattacgcgtaataagttatagacattttgaattattttttacaaacccgcaagaaaaatctggctcgtatagtcgtatgtagggcatatatagcaagctgccctgccctgccctgccttgcccatctcttgcagagaagccgctgatcactcgatcgatcagcgtgtcatcccggggaacatgtgcggcggcatggtcatcgccggcttgtgaccctgcctctccatgttcgcgtgccatcctgcacaaaaccaacgaaatcgtcgttgtcacgatcaaccaaccatatatagcagtactagtaaattccatcagaaaaatggttgtcgttttaccgaggttcatgtcgaagccgcgcttcttgagctcgcggtactcctgggagagggcgcagggctcgcagaagaagtggacggggcagtcggcgcagggcttctcctgcaggccgtactgggaccgcatcttggcgcggtagaagcaggagtagacgcagttgcagcccgtgaggagcatcaccagcgcgtacagcgccccgctcgtcccgcacgacgacgacccccggtcgatgatctccgcgatctgcccgaacgtgatgcacgggcacaggcacgtcacgcaacctgccgcacgcacaacgatcaatcatcgatcagcgcacacacaccatgccgatcgagcaagaacacaaccgtatcgggggggggggggggattactacttacagttgccgcagtcgtcgaagcagttgaagaggccggtggaccaggcggcgagggggaccttgccctgcatggcgaaggcggtggtgacgcctccaccgacgtcctccggtttcgagtacatgctgccccggcgcggcgcctttgtcgatctctcgctctccggccttcgggtgtgaggctctctctctcgatcagagggtaaccggccgaatcgcggactggtcgtccaccgtcctccggcttcgaacagttgctcttcagcgaaagcggcggcgtcgacgaagtttacgggtagtgcgctagtgtactagtagtacatgggtcgagacttttttgggcgtgagataggattgatttgctggctggtgatgttgatcgagtcgtcgttcgcgtggtggcatgaatgcgtgatggtgctgggtagggtgtggttccgtgtgtgacgggggtcaagtcgtcgcctgggccccagacgcttgccgcgactcggcggcaagctttggtttgactggccacagccttgtttcttgactggtggtggagggagtcgcttgccagagtccaaaaggacaccgcaatttttgcgatttgggttgggggctggctgggagagtggtcagggaggggaattcacgagatcggtgcggctgcgacgtcacgcggtcgcgcgcgggcggcgcggcggtgccggcgatggcggttcaaaagggggagagtgcgccggatctgggcggcgggaggacggcgcgcgcgcgagagagagagagtaggcgcgagagagcgggtgcccgtggcgcgccgtggcgcggcatgtggccgtggaagcgaagcaaagccgcgacacatgtcgcttccggcggaggaggaaaggcgaagaaatatctgagctggccgcgatccatcgatccatcgatctatgctgcgatatgtaggctccttgccgaaaatatccagggggtttccgcgattaaggctgtgttattccccctattttcccaacacacctctctcagttttccacgcgcacgctttcaaactactaaacgatatgatttataaaaaaacattctatatgaaagttgtttaaaaaaatcatattaatctatttttcaaaaaaaataattatacttaattaatcatgcaataaaacgaacttcgttttgcgtgccggggaggaggggtaccccctctccgaacacaacctaaacaatgcggcggaaggagcgatccaccgaaggccacatccccaccccttccccgagaaaacggagataggttgggttggaataaaataccactcaatacaatacaccggataaaatgccactcaatacgttgcctaatggatgaaataccactttagagatttttgtgcccaaaatgtccctggagagagagaggggggggggagaagggagcgttggggagggaggcaccggaggcctcgctgggcggtggcggcggcggccggcaagaacagcgggggaggaggataggatggcgggcagcggaggaagaggcgacagcgtcgggaaggaggactgggcggtgagcctactcgcgcgttcaccgctgagggcagggggaggaggaggcgacgcgggaggaggagcgccggggagggccggccgggcggcgctagaggcctcgccaggtggtggcggcagcggccggcggggacgacggggggaggagaacagggcaaaggaagatgcgacggcggtggagcctcagatcatcgtccccgtcgctgcccggccgctgccgctcgccgcgccgtcctcctctccccacgtcgtatcctcctcctccccccgtcgtccccgttggcagccgccaccaccaccgcccggcgaggcctccggcgccgaccagcaggcgctcccttctccctctctctctccagggacattttgggcacaaaaatctccaaagtgacattttatccggtagacaatgtattgagtggcattttatccagtgcattgtattgagtggcattgtatcccagcccaacctatagagtggcatatcgtccgttttctcccttccccgtcacctcaggatgatgttgtgccatccgtcggatggaggaggtgaaaggcacggatcttcacatgtgctgacacttgtcccggcgaggaaacgggttagagcaagtacaatagcagcctataagccaactataaccacatatcgagaagaaaagagaagagagagaagaaagcgggctacagatttgtagtcagctgcaacatggactccaagacgttttgtgtgtatgagagatgggaccgggtattaatggtgtagtatatttttataggtaactattgtatgaatgggctattaggttatatatagatgatttggagctaacatttggctatactattaaacttactcttagagcaaggataatagtgaactataagcaagctatatgcttatatggaatagagagataaagaaaagtgggaagtgttggttctcatgcaagagctagtttcacacaagcttcaagaaatatgcattaaactcaaagtgagataaagagagaggatgaaaaaaataaagctaaccttatagttaatctattatacatgttagctctaacattgacttataataagtagtgaattgtactattaaacttgctcttagggcaagtactataggcattttaggcatccaagcacagacccaagataccacatagcactaagggcaagtactacgggcatctaagcacaatctcctagtgccacataagcttaaatagtgaggtggaggagagaaaaaatgagagagataaggagccacccctcatgcaagaggcaactactacacaaaattcaagacaaagagagcgagagaggaagagtagatagggcaaacaaatattggggctagtgtattataattagtatagatgtgatatattgtacatgttacctctatatttattagttgatgatgtggtcaagattagatgtaacatccacctcttttataaaacttgccctaaatgatgagatggaggagagaataaagataaaaaagaaatagtcacctctcatgcaaggggcaactcctacacaaacttcaataaatatgtgagattgctagaaatattggggatgtgtggtagagacaatctattacacatgttacctcttaatttaatggtgtatgacatgcataaaattagatgtggtactcacctctaccataaaacttgcccttagagcaagtttaatagtatagccaaatcatctatagtcaatttaatagctcatttatataatatagttaactataaatatactatatcattaataattggtcacacatatcatacacacgtagcgttttagaatccgtgctgcagctggctacaaatatatagtccgcttatcttctctcttttcttatcttccgtaccgcagctggctataaatatatagccgacattatgttagggcctcatcggatggatgtatgggctgaggcttttcagccaaagcctatcgaattgcttattgggctgaggactttaaaccgaattgcttattggactgaggactttaagcctcaataagccaaataagccaattaatggcttttctttagcttaaggagaaaaggtaactttgactattcagccaaagctctaggttaaccgatgagggcattattgtacctgctcttaacgggtcccagcaaggccgactccagagatgggcctacagaaatggtcgactgtacagtgtacacatgtgtctagtggttactcgaaataaagattttgtcgggtggtgataatgatccacttatctgtgctcggctagttgtacaagtaggcatatttttttttcttcaaaacagcacaaatacatgcacttgtataaacatacacacacttattattcttaatacacacactcacacaagagaacacacgcacccatgattcttatgtgagtgtatgaagattgaacttgaatatcctgagatttataaaatcaccatatattacttgatatttgatattgataggtacgttggctatcagtgctataaatacaagatgatttgataggtggcaaagcgatagcgctataacgaccgtgatcaccttaacaaatcatcttagttgccttatataaggcgcttcatcgtgcatgtgaaagtcaaagatgtatgtatgcgttgtgtaaagggccagagaggtatctttggaagctttgtttattaaaaaaaagattcaatggtttaaataataggttcaatggttcgaagggaaactattttttattaaaaaatagtatgttcaccgttttagtttaaattagttaatatagaccataaaatgttaatttattgagtatataatataatggtgtagtacattatttgaaaataatagtccaaagtaattagttccctaatttaaataaaaattatcttatattattattaatttaatgggtaaatatagtggtgaaaactttattaataaacattgtagagctaattaagttacacattttttaaaaagttttatgatgatataatctttataaaagtatgattatttaaaatttagagtaaattgcacccacggtgcaacaacttggtaggtgggtgcaatttagtgcaataacttgagaaatgagggttccagtgcaacaacttggtaggaaggtgcaatttagtataagaactttataagtgatcgtataaatacaacaacttgcaagtaggtacgattttgatacaataaattaagaagttatatgataacttaatttttttggagcattttaattttttgagtatttattttgacaatattctagcatggatttgtataatcatatttatatatttatcctaataactaataactgaaagttaataaaactggatgtagaattattatatttcggttgatatttgagatggtgaagaaagaaaaaaaatcttaaagttaattggatgtaaattgtatgtgcagtataattcttaaagattaaattcaatattataaggtaatatccgtaggaatattgtgtaatggcatattgacatcgtgaaaaaactcacctagcatatgcttagccaagttgatgcaccaaaatactataaattgtagttcttgtactagaatgcacccacttgtcaagttgttgtactcaaacatttaattcgcaagatcttgcattatatcgtacccacctgccgagttattgtaccataggtgtaatttactctaaaatttattatcactattaatacgtgtatccatgaaaaaaaaaggagaaaatgtacgtatgtacctacctatgcaacaggagaagaggtcgaatttttcccatctaaacacatgtggccccctaatttcaaatgtgagcacgtattgttcagaattcttttctaatcgaattagttggtacaaagcaaatgatcgatccatcaacacgtgtagctagtaaattacagtaccgtgttattttttccctccttgctgatgttgtttctatgtaaaacaaattaatatttgttagcacaaattacaattttgatgatccaaacaaatggactagatttgagcttaccgctgccgttctaatttcctaaacgaaaactcgagactgacggcatgatgacagggtgccctatctcgtaatggttgatctaacctattgctaatggtatttgggttttctttttcataacaaacagtgtcaagtaggcctaataaacaagctgctacgagcaagtgatttgtcctaacgatcaacagccctttagtttgttactactccctccgtcccgcaatataagagattttcagtttttgcttgcaacgtttgaccactcgtctttttttgcaaatataaaaaacgaaaagttgtgcttaaagtactgtagataataaagtaagtcacaaataaaataattaataatttcagaaaattttgaataagatgagtgatcaaacgttataagcaaaaactcaaaatcccttatattatgagggagagggagtacattttgttgcacatcaagtccgatgggacgaccactgacacacagtcacacacatgagcttttgatttcaaatagaattccagtcattacatgctcacatttgaaattagacggttgcatgtgcttagatgggaaaaattcagggaatgcctgatcttggtcttcgacacaaacagcaggatccgatccccttttagttatttggtagagccaaaatctggctctaccaattctttggtaggattagacttcatattatattgttggttcgctagcaatatcctcaattggtacatggtgaagaaagtttttgagtgttgccaaattgaacgtttgggcattttccaatgatttggctccaatttaaactaactactgtttaagttgttgaacaactcatttgataaatttcggtttagatccaacgcggtccaaaaaaaagttgaggattgggctttacttgcacgaaaaaagttactccctccattccaaaataagtttattttgcatcccatctgtttatcccaaaataaattcattttctagtaatcattgcatcggagtttgtaaaagtatggataaatgcaatgagagtagatataataggaaataattacattgtgattaaataaagttggggtattctagattttttattgatatatgcaatatgagtaaaaataaacttagggttgtgttcgctgaggtaggttgagaactcattctctccgcacgaaaaacagagtggtccattagcgcgtgattaattaagtattagctttttttttcaaaaatggatcaatatgattttttaaagcaacttttgtatagaaactttttacaaaaaaatacattatttagcaatttgaaaagtgtgcgcgcggaacacgagggagaggggttggaaaccctgagcaaagaacacagcattattttagaactaagggagtacagataaagagatgcttgctcaacaccaaattgatcatctcacgggaccaggagtgcacaaaaagtggaaatttgtattatattgaattcggttgaattaagaaagggcataatcgaaatcatttctttgatatgccatatgctttacgaaactgcatacacatcaagaaatgaaaattgcatacatgcataatacaactaccggctggtaggtatatataaaaagggaccttggaaaaccaacaagaacaagttccccatctgctaagcctggctacgtgatctatgaaccatcaaattcttctagcagattgcattacgcgtactatagttatagaccttttgtattgttttggtgcaaacccgcaagagaaatctcgctcgtatgtaggcacgtagtaagctgccctgccctgccctgtcctgcccatctctagcagagaagacaacgaccgagcagggcagcagccagcatcacccactgattagccgatcgatcagcgtgtcatcccagggtacatctccggcgccatggtcgccgccgggttttgcccttgcttctccatgtttgcgtgccatcctgcacaaaaccaacgaaatcgtcatcgtcacgatcatcaacacgcacgacagccaaccattccattagaaaatcgatggctatgctataaacatattttaacatattttaagaagataaaagagtagagagacgagcagtggactacagatttgtagccagctgcagcacagactcaaatacgcaatgtgtgtataacatgtgggaccaggaattaatagtgcagtagataactattgtatcaattaactattaaattaattataaatgatttggagttggtagttggctgtactgttaaacttcctgttaccgaggctcatgtcgaagccgcgcttcttgagctcgcggtactcctggcagagggcgcagggctcgcaccacaagtggacgaggcagtcggggcagggcgtctcctgcaggccgtactgggaccgcagcttggagcggtagatgcaggagtagatacagctgcagcccgtgacgagaaacaccagcgcgtacagcgacccgctcgtcccgcacgacgacgacccccggtcgacgatctccgcgatctgcccgaacgtgatgcacgggcacaaccacgtcataaaacctgcgcccgacaacaatcgatcagcacacacgtaccacgccaagcagagaacacacaatcgtagcccggcttgcttattttacagttgctgctgtcgtcgaagcagtcaaagaggtcggtggaccatgggacgggggcggcctggtcctgcatggcgaagggtggtggtggtggtggcgcctccaccgtcctcctccggcttctgagtatatatatgctggcccgacgtacggggcgccttcgtcgatccctcactctccggcccgcgagggtgaggctttctctccgacgaggctaatgatgagcgcgcggtgtggtggtacaagtagtagagggtaaccggccgaatcgcggactggtcgtccgcgcgcatttatcgggcgaggccgcgaatgttggcctatcgatcataattttaaggacgtaactacgcatcgggtgctcgatttaacgctaaaaatcgggtgcccacccctacaaaacatcagctaaactggatgcatgcacaaagccatgcgcatatgcaaagagacatgcaacaagcatggaggcactcaatagctgtgcatgcaaagtacataactatatctctcactcctagtattaataaacaacttatttaacatgctctaaactttttttcttataaattacttatctcatctgtgatatgattacaccgttatatttgttacaattaaatatttaaaataagatctcacacgactatattttaaattaaaaattaatatataaatatataactaattgaaacacatttatattatatatgaaacattaagttgcaattgtttaaacatcacaaaaaactccttgaaaaatatctaaaaagaatatcacatgcaacattccaaataatttagtgaaacatcacaaaatacctaccgaaacatcccaaaaaacacaccacgtgcaacattctaaaatacacaatgaaacatcataaaatacctcctcaaactcaaagaacaccaagtgcaacatttcaaataaagtagtgaaacatcaactaaaacatcacaaaaaatacttcttcaaacattcaaagaacgctatgtgcaacattctaaatgacctagtgaaacttcgcgccgtttaagtaatccattgcaacaaaaaaacatttaaaatatttttgtcagaatataatcaagtaagattttattgtgaagaattaattataacaaatacaacagtgtaatcggatctcagattattagataataatctgtgaaagaagattatttgaagttatggaataagaaagtataagtatgtagtaggagcatatggatacagagggtgaacttaattgtacacgttacatgtatcatggcatcaccaatatatatagcaaaagtgattcatatagataggatccacataaataaactttaactataacaatcctcacaatgtatatagataaaaggtagcactaagagaagatagaagtagagacaaataatattatttattttatatgggtagcctatatggttttcttttttactttttagtcctttttttaaattaaaaaaaagacctttacaaaaaatatttctaaaaactgaatcttttggcccgattggctgccacaccagttgcacggtgtgacaaagttatttggctggccaaaaggttcagatttggaaatatttattttggaaggtctatttttaaaatttaaaaataaaaaaatattagtccatatgcatatgggtatcttttgttattttctttaaatggactagttgcataatagtattaggtggttgaataaaatattgtattgcctatagatcacttttgcaccacattgtggatgcccttaagtaggagagaataaaactacactctatatgatttttgatgggtaccggctcaaaagcagtggccttgatcttctttcctggctggaaattgcagtcatgaaggcttatctcccgcttcttattgaaagcaaataataagatcaaaacagattctagggattgcgttcgttggcggactcaacctgacatcttacgacatgaactgctcccaaagagggaggcctaaatatagtttttttggatggaatctttggcgtcagcctataggttttctggtttttctaatttcttctttggcggaatgtgaaagattaccctttgatttaccagaagcggaggaagaattagtagcaggttatcaaaccgaatattctggtatcaaatatgatttattttatcttgtttcttacctaaatttattagtttcctctttatttgtaacagttctctacttaggcgggtggaatttgtctattccctatatatccttttttggatttttccaaatgaataaaatggttggaattttagaaatgacaatgagtatcttatcagaaagataggcggacgacttgaccataaggtcggatgtttccgtgagcagtaagctgcggatctccccttttttgggggaaagctggtggcccttttggcgtgttaattctttcgacggggtggccttcttcgttcggtagatccggtcgaggtggttttcgtttaccagcgcgtaggtggtctaagttcctatgaccgagtctttctggcccctgtgaacatattttcttaatgtattaaagagggcctctctaaccggtgaaaagtggtaggtgtccactaacggctattcctggctcggctccgataacgcaattccgggaggagtcggtagttaggcacttgatcccttcggacctggagaacgtgtgacactgggtcggggtttggtgaaccaacaggtcgctcctttagttgaagtattgggcccctttttcgttgcctaggttacaccttcggaataccccagacggggattgagctctattccccccaatcttcactttacgccatgccgactctccgtcgtggaattagaccaagggtcgaagacccataccataggaccccatcccccgtatcttatctttcgcgcgtaggagatcgagacacagccttagggctatggggaaagtagatcgattgctctagaattacaactacatagagggtctctacaagtctataaagaagtttaaaaaaattgatagacactgtttgatggtgcatgctgcatgcaacacataaccggagtaggaggacgtccgattttttcaaattgggtcgaacacccgaccttaatcgttctcctaatttttcaagtggataattgcatttgtttggactctcgctgaaccaatcatgatgcagtgcgggcctggtcgcgcccacggtgttcacgtgggtggcgcgggctctgcatgcgggatagcacgacgggtggctacggttgtacaagcttcaataaacggtttggagtcagttgcaatacaagcttcaatacaagagagacgagtaaattaaatattaatatattaataattaactattgtataaataggctattaaattgacgaagctagtagttagttatattatattattaagggactaactagctgtcattcgacaaattttagtatagcttaactggttagattctttgtggtggaaccagcccacccaggtttaaatcctagaattgacatgggtgctcgtatttacgggctatttattctttcagtggtaggtaatatacccgtcaatagcgaggcacttacacgcatcaataacttaatgggcttcaacctaactggaccaaccaacggtgctcacacgggctaaaaaaattataacaggcccatggtcaacttcttttttatcacaacttattacaatatatctatagtgtaattatattgtaattataccataattatagtgagttacactataatgataatgtaattttagcttgtaactaaattaaattattcacttgttcgactgacgaagtgcatgttctagcaattagaattcatatgccatcccacaaaggcacttgctggaagattttgtcagcctacagtagcctagtgttggtaacttttttttttttggcaagaagataatcataatcgggacacttaaatgtcttacagtgatataaagtcgccaaccaccccgatatagccaaaggctaaatcaagatgagttttatataaagaaaagctaaaccggctagcggagccgatttagagatcaaaataagcctctaggccgatttagatcgatatgaggataactacccatctcgtgggtgaactgaaggtttacgggacaaacctatagaggggtaatcgcactactctcgcagcgacggcggacgatttacagcgcaaatcgacaaagatgtagtaaaacaagaaagtagaaaacatggctaaaagtaaagataaaagaacaattcgattgtgttcgggggggggggagagatatatcaatcgaaccggtcttgtcccttaaaaaggggttggtcttacctcctacaaatcctcctccacgtccaactcgggatagaaaccaatggaaatccgaaatataccttcccgagtaaggaaatccgagacccgacgaaaacaaactcaggctcggactctaccggtctgaccggccacacactgccggtcagaccggtcctcaagcaacgatctgaccggccaacatacggtggtcagatcggctctgtagaggaaacatgtgatatttccaaatcttgacaataatttcttaatttgaacctaggtgccaaatttgagtataaacaaaagaaaacttatgttctgatgtggtaggcccaagaaaaaaaggtgtcatttgaagtaagaaatctatcgacaaatttatagtaaaaccgtatgattaaacttgctcttaagcaaaagcgacgtcatcaatgaagtttacggatagtgcacgaacaagactcctctgacttaagtcagatgtacatagccactaacgtgtgagcccataaagatagtctcccctgtcagggaccatgtctctctgattttaagcctgaggagatcgctccggtagtacaccagtgtgcttgtactatgggtcggtactttttttggcgtgagataggattgatctgctggctggtgatgttgatcgaggcgtcgtccgcgtggtggtgctgggtggggtgtggctccgtgtgtgacgggggtcaagtcgtcgcctggaccccagccgccgcccgcgactcggcggcgagctttggtttgactggccaagccttgtttctttgtgatccgcgggtcgagggagtcgcttgccagagtccaaaaggacaccgcgatttttgcgaagcaccgcgcctggtgagtcagacagtcacgcacgacgagagggagttgtccccgggtcagattggcatgggaatcgtcggtcgtcttctctttaccttaacctgatttgagtgttccagtttcactgcgcacggtgcgagaccgaggtccgtcgaaaaacgtcgctagctgtttctgttggccagtcacggtcaccaggggaattcgcccagccatatatggcttggcaagccggatggcaactccgttgtagtgcgtttttttttatttcataattagtaaagtttagcttcaggaatgggatagagagacggttagagttgctgcataaatcccctgtgatactgcaaatatattaatattaacagcgactgacatataggccaaccgaaccctctgggtaactgcacagctgcagcctacaccaccaaaataacattggctgtgtttagatccaaactttcaactttttccatcacatcaacctgtcatacacacacaacttttcagttacatcgtaccaatttcaacccaaacttccaactttgaaaggaactaaacacagccaattatagatcacaacatgcgcatgcgaaacttccatgttgcaggcacgacgtccacttcgcacacggtaaaggcgcataccgatgctgtcatgcctcaccctcactctttttgaacaaggaataattaattatttgccactcttacggatggtgataaatgatttaccactggacccacatgtcatagacacgtaagggctcacatgtcatagacagcgagtggcaaataattaattgccacatcttaaaagtggccaaaagttaaatgtccctttgaacaaaagtagagcacctgaaactatgaaagcaacagtacagttagcaacttggcactcgactgcatgtccacaagaaaccgtaagccgtagagtcacctttcagtgaactacatagctctgtagtagagatcactgattagttcatgacaacgaaactgtacctgtaattcttgcagactgaagaattgacatgaagaaatgtttccattcacgaggctggcagcaggctcagtcagttacaaaagacctaagtcaacaactggactaagattttctttactgttttccctacaaagctgcatacatacagatcaaagaaaggccagcattgcagttctacccaactatgaacatatggctgcttgattggcaacatcgtgttgttttgaaggccaccatgattgctggggcacttcattcttctatatttcagaggctgaaaggttccgtagatcaatatttagaccgcaggaagttccagaacttttttgttctggaaattgcagcagcactttcgatggaccgacaaaaatggtcaaatatttaacatgcaattcaaatactcgaggtatttggcaactgatcaagccggctgttcagtatttggtgagctcgcgcacttcggtattgcagtcgctggtgtagtgcttctgacatttgatcaaaaaaatcaggatcccatctctgaattaaacggggatcctcagcatagcatatgtatatcgatgtaactgcactttcgacaactacaacagttaccccaacctgaaagggggaaaaatcaatcaactcaacatgatccaacaggggtcatagtagagaagtcctgctgtgtgactcctagcaatattctattgaatttgtccagtaagagaaatccttgtttccttgtaaatttcaattagattttgcatgaccataagaacttaccagtatcatgcccatcagcatagaggttgagccaaccataatagctttatcactttgtttaaaatatgtccaaacacccgtacatgttcctgtaattaacccacctaaaatggtgctcatcagaaggacagcacctgaacagtcataagcaacaagtgcttcaacgccagttgattggaacaactcccaagcatccctagctgagcgattgaaactctggccattgatagctatctgaaagtgaaaagtatgtgagacatttgtgcaagcccaataggatatcagtaatttgatatagtaatatccatacagtgatattgattcacaaagcatacaaattggtgtaacatcaatccaggtaaggtatcgggtatccatgtgcactttgacagtttgtatagtaaagttgaacttattaatagcttaaggaaacatttaaagttctatcagttcagaacataaatgataaagtggcaaacacatcgaacagggacagttttggcattggcatgagattatcaaaacttccacaaagataaaacatctgtcactgacctgtacatatgcatatttgttgaagaagcgaacaagagtttccacgatatgaaacaaaaagtcaacacagcacagcaaacactcattgttgcctattttagaacgaattcctcgaatctgaaaattagttaaaaaaataagaaaagggaaaattaatattttattgagagaatgacaataaaacatggtaatctgaaaatttcatgcggcgaaactctgttaaggtaaaggtacaaacctcccaacgtaaagtcctaatagcagccgtaaaaagtgatccatagcaaatgctcccaaatgaagttgttacagcgtactgaagtgattttagaagtggttttgggggcatcgatgcagcagcttgaccaccatgaatgagaacaagaaaaaccatccctgatactatgacatggactgtgttactaaggacagctccagtccaaaataaactgactgagaaaatctacagattacaagtgaaacaatcagaaaatatataaagaataggaaagacgttgaaattcgatatagaataaacaaaacttgcccgctcaccaaaagagcccaccattgccctccattaggtatgtgaaaagcaagaatgccagacactccaaaggaccataatgccatccaacaaagcatgactaacacaaatgcatatgctatcctcatcacatcaggaagttcccataccattcttactgccttctgcaatacaagcattgtgaaggggaacctagcaaaaaccaacccaattaatgccattggagataaacggggtatgtatttttgcagcaaatataatgtttatgagaatagaaggggttatttctcatgattttagcatagaatggaaggaacaattttagcataagaattccttatgaaaccaaaccagatattttcagggcttaaatagttttcttccacagacagccatgacatgcaaaaaggttgccataagacatccatgttaacacctaatgttcacaacaaacttttaccacctacaaagtttgtaaacctagctaaattctgtgagttgaagaaaaaacagttgctgtcaaattttccactgataacatgccggctgatattggatgacaaaatatcaataatcagtgggaacatttacaacctacaaatatagtaataatactgtttgtctgtttgatactggtttgggacataagctgattattgcagagtaatctatagaatagttgttttgttgaagtgacactgtccattaatgtaattttgcctaaagatctggttttactcacaaaagcaattattttcccatatatacaacgttatttgaaaacaggttatcaaactaaatttgcacattgcattgtatgatgtctctggcaaataccaaaaaaggaagcttgaactgtatttaaaaaaaaatgcttgaccagtgggtttaagacagcccgtgacattcaactaagttgagaaaaatcccccagaccgcagttgagcacactcaacttctcgtggggagcacgcttctaccagtgcctgcgaggggggatgttttttgggcaaaacctgggttcaagcctgggccggcatcccctctactggagtctctaccactgcgccgcaagcgcgtttacaaagcttgaaatgtacaaaaaaggattgtggaaaacccattccatttatcacatttcaatgttcagaagttatttagatattcattgtccattggtaagtttcatttccatcatggtgtagagcgcactacatggataaaacagaaatcaatagcatcttgtcctcatgtacaatcctactgggaaatgtacagaatttgtaaacaaatgtacatcaataacaattaactccaacaattcaaacatgtacaatcctactgggtacacagaatagcagagacaatctgcaacacctgcttaaatcttactccctctgcttttttatttgacgttggttagttcaaacaatatcaagaatggagggactactatgtacgcacgcaccaaaagaatggcatgatccctgacattgtagtttcttgtacatctttacagcatttgtaggcactaaagcctaaaagcaacactagcccatgcttaaaccgtgtgctaccatccaaatcaagttaactctaaaagagtgtgaagaaacaaagcactagcattgcacacccatacatatgggtgcacctgttggtaatgggaaccgacatggacacgcgccaacagcctagtaaaattcttataaaagagagctgcgcaattcatcgatttctccagtggcaggaatttagcttctgtcggtgtcagcatcatatgaagtatgaaccctcacctactcaagtctaagtttgcctcgaattgcatacgatttctaattttgtgcaggacatttgagaagacaaaaagggcagttgctgtgcattattattacctatcaagaactgacatgacgtagaggaagtgcagcgctccgccgacggcgaacgccacgccccagaagaagtgcttcccccagaagcagagcacgctgaccaccgcgaggtaggcggtgaggctgtgcacggcggccctcatgaccaccctccccccgtccttcttccccgcggccgccgccagccacgcccacgcgagggcggtccccacggcccccgcggcgccgtagtagggccagtacgactccgtgagctcggacttgggggtgacctcctcggcctcgagcgacggcggcgggggcgcctcccgagcgggctccggcgacccggcgaagcgaggcgcggcggtgaggttggtgaagcggtcgatgttgaagcggtccgcctggccgaagcggttgagccccgtcagcgcgagcgccccgccgaagacgagcaggtggagcaggaacaccaccagccagaacacgtcccggcaccgccgcctcggccacgccgccgcccccacccccacccccgccgccccagccaccgccgccgccgccgcaggccccgcggggcaggggctagggttcgcgctctccccctccgacgacgacatcgctccccgccccgccccgccggagatcagcagcagcggggaccgcaccgcaccgcaccggagcgagggatcagccgcgagcggatcgcggggaggaggccggaagcggaggggatgacttggaggagaagaagaggatggggaggaggagtaactgctcggcagtagtagaagcgaggcagtagtaaccgtttctggtcatcgacgacggcgacgactcgcgctgaaactgtgagaactgggaagcgatgggcgatggcgacgtcgcggcggtgtggggtgtttggggatttgaggggaaagccggggaatttcgggggttttgctgttgggtttggggggccgggcggagcgcgaccggcaccgcccccttcctccgtccgtcgctgcgcctggttggttggctttgtggattctagaagcagcagccagcatctcaaagcaagtggcagttgggattggagaaggcgaggccttggtggtggcgtggtgccagttcggaattctgatgcgccccgctgcacgagaggagattccgcgacggcaactcccaacttcttcgtccgtcgtttcgactccccgattcggcgattcgctaccggggatccaaatccatatccacggcgtttgtgttcgtttaacctgcaacgtttggcaccgttcgaacgtgacaccgtcgatctgtcagttactctcggtgtcaccgtcaagaaactacggtgaagttggaatttttttccatttttaaattttttatttttaatatttatagaaatattgtaccggcgaaaatttttacaaaagtataccctgccgagggcggcagtgtgacatgagggacgaacaagataaaaaaaacctagaaaaatgcatctttggtagggcgaaaattgcatttgcccctttacagcccttgcagaggacggcaagggacctcagtgcaaaatgcgcacaccttgccgtccttcacttgggcgacagaggccatttctgtaaatattttggatggtataatatttttgtaaatattaaaaaataaaaattttaaaatgaaaaaaattcggtgaagttgatgtgacatcgatgggccgaagacgagacggttttctgagccaggcctactactgggcgaattctggagaacggcccactggagtactctctgtctctctcccactggacagaccgggctcaacgcagacacggaacggagccagccatggtgaggtcggggcaggcgtcatgtgcccctgacacctgggcccccccgcgacatcatcctccagtcacgtcgtcctcctccacctcgggtccccaaccttttcaaccacacccacccaacacgccatgatgagggcagcagacaagtgggtcccaccaaacagtgtcgacgggtagatgcggctagcagccgtaacaatccgggcccaccttatcaccaacgcggagtcacccgagcccacatcgcgtgacctcactgacatgtggggcccagacggttaactgccggtgggaccacggaaacagagagggcgggggagaggtggggccaaggctccacctgtgcgtggaaaccttttggactgctttggtgtgcccagctttttatgggggcaggagcgcgtccggaaatagaaacatctcgccgaatttgaactccacctgagcacaggagaagccgcagccactgaggtaaactgctcctcctcgccgatttcccccctcctttttctctaataccaaattactcgagaaattgtgttggttcggtccgcgggtagcgtgattcggccagatctggcgtctgtgtgtgtggagaattcgagggttttgtttgggtttgtggggggagtaaatccggacgaatctgtggtggtttgggggggaattcggtgtgtgtttgagttgatttgagttcgtggatgattccgttggatattgataggtcctagttctgatccagaagtggcggctacgcctttgctgtagcctcaccgatccgccgccgccgccgccatgaagttccgctctgattcgtcaggcggcgacgagccccgcgctccggctgccggcgacggcggcggcggcggcgacgagccggccaagaggcagcggaccgatccgtcctccagttcgagccagggcgaggcctcctcttcctcgcagccgccaccgcagcagcagcaggaggagcagcctccggaggatgcgggagagggcgagcagccgagggttccggatctcggggaggacctggtgttcgaggtgctgcggcgagcggaggcgcggacgctggcggccgcggcgtgcgtgagcagggggtggcggcagctcgcggaggacgagcggctctgggaggccgcgtgcgtgcgggagtgggcgaacctcggcttctccgagcggcagctccgggccgtggtgctctccctcggtggattccgccggctccacgctgtctacatccgccccctgcagtggcgtggcgccggcgtgcccaggcaacaggggaggcggcagccgccggtgaggttgggccgggaccaggttcagctctcgctgtcactgttctccattgggttctttcagaatatgccttgtcctaagaaagacaagggaaatgacagtgataagaatggagggggccaatgcgggtagtcgaatttgtggaataagcttcactccaacaagcatcatcctaagctaccatggcagttgccctattgttcacactggtgatgctagagagtgttggagagacgaacaggaaaatcggcatgcttgatttgggacatgagagaaattaagtggaattgcaagatctgaattggttcggttgtgttccgcacttgtaagatttatgtgatagtgtcacatggattgatggacgttgagtgctatgaggacagttgcgtgaatgctgatgacaagtgatttacttcaagagaagggagaaatggtttgcaattcgttctgctgttgctgatattctagttatcagctattgtgtcaacttgatatatctggcccaagagcagtatggactgtgtgccttcttgcgccggtaccaagctttagagggaaagctgatgcaaatagcttttgtttgcataacctttttcaattagggaaacataatttcccatattaggcatatggagaattatgtgaggtattgattgtttgtacaaaaataaccattttattcttgaatattgcattttcacatgttaactaaggttcttaagttgatctgactgccatgtacaatatggagcccaacaaggggtagtgacacatatttctcaacttcagtatgcaataagtcagtcattttatatgtttttacatgtggagctgcggataatgtgacaaacttatgtaatcgtgaatgatcttttgatgtttctctgtttttctttcatgtagtttgatataggattcctttatctggcactattgaagttttgttgtaaataatgttattcttgcaaagattatcttaaatcaatcatttctggatctgaagaggtattgtaacaatctgaagctttgcacaaccaattgcaactaaacttttgtatttcttagggtgaggacttgaggttggtgtgatgggcatttagctaactgaaatttctctcaaacctcacagatttgaccttctgtttctaccagaaaaacacaaacagtgaagatgtcgcagcctgctgagctttcccgtgaggagaatgtgtacatggctaagcttgcagagcaggccgagaggtatgaggagatggttgagttcatggagaaggttgctaagacagttgactctgaggagctcactgttgaggagcgcaaccttctatcagttgcttacaagaatgttattggtgctcgccgtgcgtcatggcgcatcatatcatccattgaacagaaggaagagagccgtggtaatgaggatcgttgcacgctcatcaaggaatacaggggaaagattgaaactgagctctccaagatctgtgatggcatcctcaagcttcttgactcccaccttgtgccttcatccactgctccagagtccaaggtcttctacctcaagatgaaaggcgactactacaggtattacaatagttcctggcatagcagtctttaatttctatttctttatattgtcaagttcatgtgtttgaatgtatgtgtttgataggtacctcgcagagtttaagactggagctgagaggaaggatgctgctgagaacaccatggtggcatacaaagccgctcaggtggtttccttaacagtgaatttgttgttgcggcatcctgtttgtttgtttgtgccattttgcaattttgattcggggtattcagctaaagttatttgtgatgtgttctcctttggtctgttttgtttttctgaatattgttggtgataaaatctttcaggatattgccctggcagagttgcccccaactcatcctatcagacttgggctggccctcaacttctcggtgttttattacgagatcctcaactctcctgaccgtgcttgcaatcttgcaaagcaggtttaatttctactgcattctatttcattatttgtgaattggaggaccatatggagttgagaagatattttgaagtttataccattgttgtgaaatataatgtcttagtaattgggattgaacaaataacatgtatgaattagtaatacacctggaacaggttctacttagttctgttagcaaatagcaaagtgtaggctccttaatgcaagtaagctgaacgggttaggtgcattgtcatgatggattttcttcattaagaatacttgatagaaaatgatgaatcaaataagaggtgtaagaaattatagtttacagttacagatttgcccaccttgaatacttgagtgcttctaaataactgatgaagtccgagcatcactatggccattgtgacgtggaacaagcttgtctcaatatggccatcgttcattcatagaggcctaccagtttgttctgtaatttgttaataatagatatctgatgtatatagaatggtttactgcagacaagtttgctataagttcactgctttgtccatggatataattgatcttggacttggagcacacattatgtgccttactttatgaaacttgcttgtgctagtacttatatttgccatcataatagaatgtgacagtaacctactttatctcaggctttcgatgaggctatctcagagctggacactctgagtgaggaatcctacaaggacagcactttgatcatgcagcttctgcgtgataacctgacgctgtggacttccgatatctcggtattttcttcgccgctagcatatatatttgcacttgcatcatattgtctttggaatcatcttaaatgcgtaaattccatgtgtgcggcttcaggaggatgctgctgaggaaatcaaggaggcccccaagggcgaatcaggagatggacagtgaacatgatcgaatgcgtgcgcccacaaactagaatagtgacgctgcaaatgtgctgtgggttatcgtttcattttatagattgtaatgtctcgtgatttgtcggaaacaggaggcgctccccatttatgttgtgctaggaaaccttgcagctgactcgctgcttggctggtggattctcgagctgcactttctttggggggagcctcagggtggaaccttcatgtcacttattggatcgattgttttcggtatgtcagttgtgagccttatctccagagtccacagtcctgccaagtgccctgcttgagtgtttttggtttcttcgatgtaaatcccgttgtgtgcacgatggttcttgattcaccacacattgttgtctacattgccaaaacgtatgcttcaagtgcccaaaaggccgaagcggtccgagaaacattattctgtcaggtatgtgtgataagcggtttcatatgcaacaatgctgtagggacccaaatgttcactggcatcatgtacagatacttgtagtaccaaaattagtttagcagatataagcaccagtggtgtggttatggccttatggattattacgcacacacgattatgccatcactagaaatttagtgactaagatttactaatgacttctgcgtccactcaacgtacaaatattgtagttttctagatgatttttttattttctataagactcatcaaaaaatattatatttgataggatcccttgaaatttttagttgtgtttttcatgagaatgagcaactaaacataactaagcataggggtgccttctgcttgaaaatttttatcattaaaaaaatggggttttcttcttcaagtttgaatatttaatttctttcttttttctacaacattttaaaagttggcactaaagaagacaattattatgcaaagaagataatacatctatttcaatcctaccagaatggaaagctctggaagctgttaaatctttttttccctttttttaccttgcttccagattgtggccccgacgatggtgtcaccttttctattttcttttacatttggagcttaagcatctctattgttttatttgagctccgattctagagacattcttagcatctagaaaatattttttattccaataatgtcattatttatttcatattttattatattttctttattttctttcctaatttttattttgcaatttttcagaaggtgatgtttattttagtagtagtattgttgaaggatctagatgttaccggtttaatttattgagaattagtatagaagtttctggagagactataagctgcaagaaagcttgagctctgtggcatcttttcttgctccatttgtgttttttttttcacaaaagagtctatcatttatcttggaagctagatgcgccaagtgaaccaatcagctggctggatctccaaccagctttagaagtatagctccgttacaggttataagacgttttgactttggttaaagtcaaactatttcaagtttaactaaatttataggcaaatataataatatttataatactaaattagtttcatcaaatcaataattaaatatattttcataataaatttgtcttgggttgaaaatgttactaattttctctataaacttagtcaaagttaaaacagcttggttttgaccttgaaacgtcttatagtagtttttttttatggaaccgaattctggaaggagtaggttgtaaacagccgccgtttgccatatacatatccaaatcgcaagtctcccgccatcgcattgcccgccgaaatagcctccctgcacatcacgcattcacgttcgcacgcagagccaggtaaaacggtcactacccgccacgccggcggccggccgccgcgccaactttgcaccggtttgatgtaatgatgtgtgcagtggtggaggcgccgccgccgccgccgccggacgagacggagggccagcaggcagggggcgacgattcgtcgggcggcggcgaccggcggagaggcgccgccggcgccggccggcgcgtgatcgccgcggtggctttgggcggagcagcctccgtcgccgcgctgcttcacgttttctgatgatctcgcacggcaacaggccgatcaattattattattattatttttcagcttctttagactgtcagtgcctcccagtaatttagcggtagaagatatgcaatgtggcaatgcaaatgaacggttatcgatggttaatttctttcgacgtaaacatgcttatcgatggttaatttcttcatgtaatcaggtttagatgagaccttgaggttgaatatgtcgttcggcttgtgatgcgaacatcccagattcaaaaacatcaagcaaaagagctatagtttcagccaagaagtccaaatgggaagcatcatcagactcgctatatttccctgatttttcaggtaccacaactcgcagctcaggttttctagctctgatcaataagaaccagatacaacatacaaggcacggtcggaagcaaaagctagttttcttcatgctggagaagtgactcaactaaaagcttccagagttcatggattggatgccaaatgtttacatcggctgcagattaatttccatggagagccacgattgttctactcaccttaacattctacggctcttggacgtcagatacatataatacacagcaattttttaccttgtaatgaatcgatttttgatctcattgtggatggcctaatggctcgacagcggttctgaagagaagaacgtagaccttgtcgacggagaagtacaagaagcctcccacagagtgggtgacataggaaccaaagcctgtaccaacaatgcagtgccaagcaggaccatatgttgcgtcgaattcctgcaagaaaatgaaaaaccacattaacaatggctaagacatttcatcctagttggctcagtgaaaaataatgtaaaacgtagtgttcaaaaggaaaaataataatacagtagggaagttgctacaaactttaacctaaggtgcaaccgtgcaagtgcaaccgatattctgagcattagcattctgtagtaaccaaccatccatatgagaaccacttgtacatagccagtttaggagcactgagaatcagagcttacagacatgcactctgaacttttttgtgtgaaccttgaacaagctgaacaacagaattcgatggaaggtgctgggaaatatgattggcaattaggactaaaaaaatgtgccctaattttcatctgcctttcagggatatctaaatttcatatagttttttttttcatgtgatacataaatgcctgatgaaaaaattatttcaagtagcaggtgcctttgggcatgagtatttatttaacataggaggtttgctataaaagtatcattcctacaaaaggtgtaagactgcagaaaatcttgttgggtcaagcggtcttctgacttcagatagggctgcaattttgtaagtaactcttcttcttaatacaatgatgcgcaaatcatttgtgtattctcagaaaaaagactgcagaatatgacgaagtaaacacagaaatattcttttgcaccacatccacaggtaagagttaagatgttgataagttagcacgttgaggttattaagaaggataggcagacctctaagtcgaactgtcaaagtagtcataagtaaaagcaaaatactgttacttcttctagacaaagtattttttttattcaggcttctacacaaggaatgcactttaccatccattattacattgttttagccatatgttgacgaccaatgctaacaaatagcactcattcacaaaattgaaaccttgaatgaaaaccatctaactacaaagcaaaatattgtgtacctagatggcatgcatccattttttaagcaaccaatttgcgtacctctttagaggatgcatttagttaatctaccattgagcacacagaagtctagattgctctcagattcttgtaatcaacaaatttctagaagatctgttccacattttaatgctcaggtaatgagctactccggctaaaatataaaatcagacaaagcaaaaggatcagatggtgtgaacaacaacatatatgaatgggaaattctgttaggggaatggcgaagaatgaatcttacaacacaggggtaaaacaaaagccagcttctgagcttcacgggtcacagctaacaaatgctggatgtcacatgtgttaggctaagctgtcacaattgcatttctggtatatgattctaaagtagcttttcccctatccaatgttgggaccaaatgataacacatctctaacagaaacagaaaattttcaaccatagtcactttcttcaagatatcccttccagttatttataatagagatgctggcattgcacctgtctatctatttttgctaaactagcctcaaagacatcgttttccttttcccattttcctgtttttaaggttcccatcactagccacctccttgcttgagttgtgaggctatatatttcttgagaaaattcccaatatacccctgaaaatttactcaatcccttcaatacccctgaatttgacatcatcccttatatacccctgagttttcattttgatctcctctatacccatctccgttagttgatcattagttgaccgttaaatattttaaaataactatattacccatcctatacaatggtacctacctaataaattttcatatgaaaaaattaacttatacaaaatacaagcaatataatcatttaatgcccaacttaaaaaataaaacttattattttttattttttaaaacttatgattaaatccatacattagtttcaccagaaaattaagagcaaaaactaaatgttatttaggtttaaattttaaatttgttttctaatttgtgataaactaattacatcccctttgttttttcgcaacaaatcttttttcactaaatatttgttgaaaagtaattttgaaattttatgcagaactttttttacaataaatcttttttattttaatgaaataattttttatttttaaaaattcataacaaatatttagtaattttccttattggttttcacaactcaaataatttacacataaaacatttctagcttttaacaatataccaaggacaacaaagtaatttctacaataactaacggtcaaactaatggtcaactacggaatgggtatgtaagggatccaaataaaaactcaggggcatataagagatcaaacaaatctcagggacgtagaagggattgggtgaaattacatgggcacgtagggaattggcccatatttcttgcccaaatttctcaatcccccaaccatattctttactactccctccgtttcgaaatgtttgacaccgttgactttttagcacatgtttggtcgtttgtcttattcaaaaacttttgtgaaatatgtaaaattatatgtctacataaaaatatatttaacaatgaatcaaatgatatgaaaagaattaataattacttaaattttttgaataagacgaacggtcaaacatgtgctagaaagtctaacatgtgctagaaagtcaacggcgtcaaacattttgaaacggagggagtacaaatttaccaccccaatactgcactgtgccactgtctacgtgtactcgaatagcttgaacaaactgtagccaatggcgagacggatggttttaccttcttgagggcgagggcgaggcgcttgctgtcgagccgcggcatggcggcgacggcgtcgaaggcgaggcggaccgcgcgccgctgcatcgccagcggcatgtcggccgcgcgcacccggaccgacaccttcctctcctccttccccttctccatctccttctccttccccttccccttcccagcttggccgccaccgccaccccctcccttgacctccctcttctccaccacggcggccaccgccgccggcttcttggcggcctcctcgactcgctccggctgcggctccatctccagctgcagcttcgtctcgggctccgggggaggcgtgggcgggggcggggcgagcgccggcgcggcgtggagcttggtgcggcggatgagcgagctgaggtagcggctgcgctgctcgagctcctcggacgccggatccatggcgggcgtgggcgtcggagtcgtcttctgctgctcttccttccagggtgcggggacgcgcgcggggcgtcgtgctcacctgaggcggcggcggcggcgagcgttggtcaccatcgctgcctgcgccgctgcgcggtggtggggggaatggaaatggaagtggccaaatgagaggtcgtggtcaaagcacaggagaagtagtagcgccggttcacgagacgaggcggtgtggggtccgtttcccctggccttttcccgatggtgattggtgacccggcgaatgtggtgagcgagaccggtttgaaactttgaactcctaacgaacgtggtgattcgttgaggccttgaggggattgtcgcagaaatagctacattttgtaactgagagtactccctctatttttcaatagataatattgttgacttttaaatatatatttaattatttatcttatttaaaaattatgtgtaaatatataagatataaatcgtacttaaagtattttaagtgataaaacaactcacaacaaaataaattataattacataattttttaaataaaatgaatggtctaacatagaaaaaaagtcaatagtatcatctattagtatgtcattgtgaactgtggagttgtttcgagctggcatttttactttatgttcagtgctactgtgcgagcaacacgaatggatacagatcaggtatagttgtacttgtatggattcttatcggaattttagctcttaaatttaacttgaagaactagttcgaagtggagttgtgaagtagttgaatcgcgctctatatctttcattttgtgggaacactccagcagtccaactcgagcattatttaggacttgtttagtagagctccaactcttaaatttagctccaagagttgagtctggagtggagttgtggagcttcctaaacccatctccacctttctagttcattttgtgagagcactccacccagcttcgctcccattttaggtggagctggaactggttcattttgtgagagcactccacccagctccgctcttattttagatgaagctagaactgctggaactggttcattttgtgagagcactccacccagctccgctcttattttaggtggagctagaactgtttggctggactctagctcaggaaaggtggacttggagctagagctgtgacaaacagattctcagactctagctccagaaaactgtttgtttcgactctctggatgagatgagactctgctcctttgtctccggaattctcaatttcaaggcttgtttggacatccgagtgtcatcattgcaacagcgctcatattttctaaacaagcacagaaggttaccaaagagatactctctctgtcccaaaatagctctaggattgaatttagtttggaacagacgagtacaccataaaacaagttttcgatgccagtatgctccatcagtccatcatcgaacttccatccctcaagagttcccagaataaacattagcaatttaagatcacataaaagccaaatggcttcaaaatgtagactaaactacgatgggtaaagaaaactgggctcttctgacattttgcctaatcttgtgcataaactacataacattgcttaatctcgtacattaattacataaaagaaaatcaacagcaagcaaatcataaaccatacttcttcccccaattaacattaagtacataccagaatcatggctgtgttctccccccccccccctccaacccattttcccaacccacctctctcattttccgcgcacgattttcaaactgctaaatagtgtgatttatgcaaaagctttctatatgaatgctgttttagaaaatcatattaatccatttttcaaaaaaaaagttaatacttaattaatcatgcaataaaatgagcttcattttgcatgccaggagaaggggttcccaacccctcctaccgaacacagccatagccacatccaactccgtgtttttgagtttcagaaacaggctttactatttgttgtgcaatgtgatctaaagcaaaattcgtcacagaaggcaaagcccaataactaactgtaataaacgttctcaaatataaatgctctcaaatcaacaacagtgacagtcttactactgatttagactggaagtttggaagctaacattccggaaaagtttcagatcagtaaactcggctagtaacaatcttactgagtactgaactactgaccatgctaatgccactaagcagcacactacaggatttgaattcaatgccatgctaccataattctattcatcgcatggtcctcaacgatcggagtagtaatatactccctccgtttcgttttatttgacaccgttgactttttaacacatgtttgaccgttcgtcttattcaaaaacttttgtaaaatatgtaaaactatacgtatgcataaaagtatatgtaacaatgaatcaaatgataggaaaagaattaataattatttaaattttttgaataaaacgagcggtcaaatatgtgctaaaaagtcaacggtgtcaaataaaacgaaacggagggagtactgatttgatcatattcagatcaacccatcaaaatgggccaacaaagcgcaacaatgatcccagacaaaacagatgtttatgaaaaaaaaaaaaaggttctctatacattgttcagtgtttctagtggttcacttaaccaagaaaatgtaccacagaacagaagaataccaggcaaccctcatgataacggcagattgactatcataacaacaaagaagagggggaaaaacagccacaatatcaacaaggcaatgtagagctttaaccagacaaacccaattagagcaaacaatttcataaacaaagttgctttagtgcaaaatatctgatacctgcattgcaatagtcgaaggatcacaaaattcaacagactaccacaggcgagagtgggcttgccacaatttgtaaagaaatcaggggttatctgttttttttttaactgccgagtacatacagtactgtagttttattgcagttcattaattaactgcataacaaggaaatcaacaaacaaatgataaaatggaagtacacattgccatctccctgcttccaatttttccgaaacagagtttagaatttgctgtgtgaccggaactaattcacatctttgtcgtggaaagcaaaagtgcaaaactaaataactgactgaagaaaatgtttaagtcaacaacgctaacagtcttacaaccttatcccaccatcgactggaagtttggaagcaagataacctcaaaatatttcagaccagagaactctgaggccagtgcgaaggtcacaaactgaacatgttaatcgcactaaagcataaaacacactacaggattccaattcagtgacaattagcataattccattcatcacatactccacaacgttcagacttcagactagtgatttagactaagactaacttcagacaaatcaatcaaaatgggcaaacaaaagctgcaacaaactggttatctgaaaaaacagggggtcttctgttctctttatatacattgttcggttcattattcctaagggcacatagatgcaatcctcgtgataagggcagaaacatgtcaatccaatgctaaaagaattatcatagcacaaaattggataaaacattcacagcatcaacaaagcaatgtagatttctaaatataagattcctgcattgcagtagttgaaggatcacaaaattcaacaaattgccacatattttgggcaagacaaatgcagcaattgttcgacaattcatctccatcagtggaaaatttatgggatccaataataccatgaagtgataataagatctaaaaggtaatgcaactgactaaagggaaagatgatgattcattcaccgagcgccgctgagaccaagcagcatctggctgctgtcgccggccgggatgtacgagacattgggggagcgcgcaagctccccggcgatctccttggcggcctcgatcctcctgagctcgatcaggccggtgcccgcggcggcggtggcctcggagatgaggcgcgcggcctcgctctccccctcggcgcggacgatggcggcgcgcctctcctgctcggcgcgcgcgacgaggaacctggaccgctcggcctcctgctgcgccacctgcttcttctcgacggcctgggagaactccgggccgtaggcgaggtgcgtgatggcgacgtcgtcgaggacgatgttgaactcggcggcgcggcggatgagggagtcgcggacaagcgcggagacgtgggggcgctcggtgaggagctggtcggcgttgaactgcgcgacgacggccttgagcacctcgttgccgatggaggggagcaccttctcgtcgtactcgaggcccagcgaggtgaagatgtccgggaggcggtcgatgtcggggcgcgcgaggacgcggagggtgaggctgaccatctgcaggtccttggtcccagaggtggaggagaagctgtgcgggcgggtgcggatgtcgaagatgaagggcttctggagccaggggacgatgaagtgggtgccctccgacgaggtctccgggagcacgccgcggaaccggtcgaagatcacggcgcgctgcccgccgtccaccgtgtacagcgccgtcgacgccgccgacgccgcgatgcccagcccggccgccgcctgcgccagcttcgtcagcagcgacgccgccgcctgcccgccgccggccatggatcccgatggatgggggttcgcctgcttttccggtgggggattgtttgggaaaggggtttgggtttttttttggggggggggggggggggatttggttgatctggtggggtttggttttaaagccgtgcacgggtttccgcatttcttggaagggaagaagaacgaaacttccagtgcgtgggcgtcgatggttggcaggtggcagggcactcgcattgagattcgtgctcaggcctgatgggccgtgggcctcctccggtcgatgctttgtgacgtccaatttaagtccctcaagatatattccatccgttccaaaatataacaacttttttaccaacattctcttcccaaccaatcacaacatcctcctatttaattctacctactttattaacaacaatgtccaactctaaatcttcttttattatgtaacgggggtggtaagttattttacacgagttcttattgttaagtagctgagggatacaaatcattgaacattttcctcgagtgagaacctcgagcacttctatcgagactcacattcaagatcatgtttgtgtctacttcctccatcttaaaatacttatcattctaaataatttagtataggtcgtgtttgtagtctaccaccgaagaagaggactcgggttccaccagctgaggggttatagtagacggcgacgggacaataatggtgaatccgtgaatagggtggcagcaagcaagcaagaaaatgggagaggaaggtgaccggattctcgacccctctagctcaatcctccaaccgcgtgtcctcgtgcttgtaagttgtacctgtccatccccatacatgtacgggcttagcctggacgagggatgaagctctcaccttgcatttcgagttagtgtagctcggaaggctatgcgggtaaccaaattattaacgctattcgtttgcacttgtgcatgccaatcaggctttatgcaagtaaccagacacgtcttttagccttttcttagcaagagatggttggttagggagatggctaaactttgatcagctagggaagagctagctagcctgataaatccactgaacacttatttttaattacttggttagctatttttagagatggctagtctgatacgtacgtagtatctaggtaggggcctcttacaaatgaatattgtacttatctccaatttaagcaaccagaggaatatatatgcttgtattcgagtagagttctttcatagtagtagatgcttagttaggtaatagtagatgcttaacactaatattagaaaatgccccccacgtgaacgtctaaaatgggaaatgccccgtacgtgaaaacaacaaaacaactcatagttgattcatgctctcgagaaaacattctctcgttatttacatggtatctaaatagttatgaaaaaatatagaaaaaatcaaatagatagattaatatgcagtataacactctacaaatatgtagattaaaatttaacttttacaagttgtaaaaaaaattaaaactatgactagttaacgtatatccacaatattttttttgcaacttatagaagctaaatttgaccttacatatttgtggagtgatttatcatatattaatttattttattcatgtttttcttatttttttacaatcatttagataacttacaaacaacaagatttataacaactcttgtactccaccgaaacaagaacaatggtcccccacacgacagttccacacatatcgcacgcttccccttccctccgtcccttgagccatggcgcgcgtttaggctttgcaaagagccaaagccgcgcaaaaagcctacacagctcatccatgcagctgtgacgctgacgcagatcaaccaaccactactaccgcccgcaagctcacgcagctccagcactggcctcgtgttcgatcgatggacatggcggcctgcgtcgacgacgtcggcaagccgcgggcgtcgaggaaggtgtgcgtgatcggcgccgggatggccgggctggcggcggcgcgggagctgcggcgggaggggcacgccgtgacggtgctggagcaggccggcgacgtgggcgggcagtggctgtacgacgacccgcgggccgacgacgacgacgaagacccgctcgccgccgccgccgccgccgcgaagccggtgagggtgcacagcagcatgtacgcctcgctccggctgctcggcccccgcgaggtcatgggattctccgacttccagttcgtgccggccaggaagagccgctgcggcggcggcgacaaccccggcggccgcgacccgcgccgcttcccggggcaccgcgaggtgtacctctacctcagggacttttaccgcgcggcggggctcaccgactccgtcaggtttaacaccagggtggtgcgcgtcgccgtggcgccgccgccatgccgaggtggccccggcgacgcgctgagatgggtggtgagatccatggacgccggcctctggaagcgatgcaccgatgaccagatggcggaggcgcactgcgtcgaggaggtgttcgacgccgtcgtcgtggccaccggccactactcgcaaccaaagctgcctagcatccaaggtgcgtagcgccgacgagcgaccaaatcagcaaacctgctcttgtctcaggcagaaatcgaaatgctaatctcgccggtaattaccctggtcgaaatctcttaattaatcaggaatgggggattggaaacggaggcagatgcacagccactggtaccgggtcccggactccttccgcgacgaggttaattaactaatttgctgccacggctgtgatttgtgactaatcacaaccacagtgcccgttaatcttggattaatcctggcgtgcgtgcaacgctgcaggtggtggtgctggtgggctgcggcgacagcggcatggacatcgcgctggacctcctcgccgtcgcgagggaggtgcacctctccgccaagtctgtggaggcggccgcgacgccggcgatgtccaagatgctggcgaggcacgccaacctccacctgcacccgcagatcgagcgcctgtgcgacgacggccgcgtggtgttcgccgacggcggcgggggcgtcgtcgccgccgacaccgtcatgtactgcaccgggtaccgctactcgttcccgttcctggacaccgaggggaaggtcgccgtcgacgacgacgacaaccgcatcgggcctctgttcgagcacacgttcccgccgtcgctcgcgccgtcgctgtcgttcgtcggcatcccgaggaaggtgatggtgccgtggttcttcgaggcgcaggggaggtggatcgccggcgtgctgtccggccggcgggcgctgccgtccgaggaggagatgacgcggtccgtggaggagttctaccgcgccagggagctcgccggcgtgcccaaggcgcacacccacgacgtcgagcctcacgtaagcacatcccatggcggtctaatctgttcacttcttgatcgaatatttgaatgatcgctcgttttggtggtcagaaaatgtatgagcttggggagaagtactgcgatttcccgcgcacggaggagtggaagagggagctgatggcgatcatcagccggaacacgagcgacgacatggagacgttccgcgaccgcgacgacgacagcgacaacgtccgcaggtgcctgcaggagtggtacgccctggctgagcaccaggctcaagacgaagaagacccagctgccgctgctgcacaagcacccgtgcacagctcgctctgaagcctgtacagctgtgtgttctgtgctctgcacaatcataattttcttctacagagcatgaaaatttctgaaataaaacagagcatgcagaaatttcgaaatttcgctgcatgatttgggtctctgcaaggccattgcccaatgatacggccgttggatgagatagtgtgtattcgtttggaataagtttacattaggttcctcatcttgaaagtcaagtttgaatcacgtccttcaatcgcaataacaatacataatgcgtctctcaacttcaaaatcaatacaaacgtggtctcaaggtggtttggacaattgtttagctgacgtggcgccaatgtgactggtttaacttagtcctcatcccacttgacgaaaaagtgacactagaaacacgattaataattttaaaattaagacaaaatatgtatggcttataagtcagtaaaaaaagataaacaatatagtggggcccatatcttctacctctctatatcgtcatgtctttatccttctctcctttgcaagcggacgtgctctcctatctagccgccaccttttgatccaactcgctgttcgtggtttcggctcccgcacttccacaacgtcattgtgcgctttgccccagtgcctcgttcttcttctccgcatcatcaccagtttgccacaactcgctggcacaaccatgcaatgcaaggattggattgagttggattggagagagaatggcaatgtatttgtccctcgcgccctcccacctctcttgccttatgacctccgccacggcgccatcgtcgcaacagtctcataccccgcgccctaacaacttcacctcaacgtacgttgataatcgctatagccagatttggcaaggtacgatatcgttttgcttacactgggggtgattggccttggtctatgtcgtctttttgctcattggctaattagttactttccgttgccttgtggtgatgccgtcgccgtatcctcgtgctgcccagcctcgctggccgccacattgttgaaaagacctggtcagactaccacgtggacatcacataagataaaactggtgttgaaaccgttaaaggactcgatttgtgccatttttaatagctgagtaacgttcaatatgcggttttttgcggttgagggatgtgaatgaaactcgatgtattgttgagggataaagtagacttatttctattcgttttcctcccggaaaccggccagctacatgggctaatacaactatacaagcccaccagacctgggcccatcacatacattacggtcccagatttgccacggtcacacgcacaacctgcccgcgccgcctctaccgcgcggtcgaccaaacgctgacctccagggtccacccccaattgggcaattcggcgccagctgggggaggggccctcacgtacgcacgcctactcacgcgcgggtggtagcctctctcgctgccacgttgggccccaccgttgataaagctggactccagtgtagtaccacccgctaccgccactgccagcgtgggccttcaccttgacccgagccaagcgaaaccaaccgcggtcaaagggtgggcccacagccgcctgtttttctatacctcccctgctgctggccgtccgatccgttctcatctcaaatttttgagccgtcggatgtagtaatggggccttcgcgtaaccaccgccgtagcggaatgggagcgaggcgaggggcgcgcgcacacacagcgcgaggcaactgaaacgaaacggcggaaaaaaaaatcagcccaacaaatccagacgttttacccggagggaccttgcatttcctcgtaattacaagttcgtatccgttggttggacctagtaataacgacttgacagtagcatgccatcctgtttctttcctctctttcgagtgttgaaatgggggatttaaatgggttgccatatacattgatgctaagtttagcatcttgacaacaaaggatagttcttatttagtacttcaaatttctttaaccctaaacgtgagccgtcaacagtcttttcattttctcactataataaaagaacatcacttgttaacagcgtgataatttatttttatcgtcctcgtttgatattatgaaaacttattttatttttccacgtaacacctgtatgtagattcttaagtattgtttgtaataaaatgcaacacacaaaaaactattaatctaaagctaataacatccttctcgtatcggtctcttttcggtttttttaattgtttggatccttctagaaattggcgcgtgttagactactttgtaaaaaactcctcaggtatatataaaatcttatataggctctctaccacctaacgtgtatatagtataggtaatagatacacccgcacaacaacgcttgttcattggagagcaatgaaatagtagcaagttagcaacgttgataacaatgttagctttttaagattcacatatagcagtgtcaccacatatgtgcctatcaattcatccgtctgtcatgaatgatagaaatgttatgagtacgatgacacattaaaacacagtcattcaactacacttctcttcatgaatcgtttacttgtagatggtggtacggcatatttctcttggttcataaaaaaaatgctacatcttatctaaatctaaagttatcattgcatttaaaccaacactttcaattacaggattttaaatctacgttataccgaaatctcaagcactacaactcataacgttcacagagctagcgacattatcgagcataagcgactaatagtgtttcttcatgacctaccacttctttatacgccaaagacaatatgtagtgaaggtggcgacgatggagccagacgatctcccgacctacctgagagctgtctccgccactacatatcacccaaccaacttccattgatacacacacaatatctgaacctgggtgattaatgatgtttttatatgacctaccaatttgtttatacaccgacgataatctgtagtgaagatgctagcgatggaacccgactggtcgcccgacctgctaaacatctgtcgatatatgcacgctgcacgctgcacgcaatatctccaaaccacagggtcctctccgcgacgcggagaaacattagggaagttgggcttccgctttccacttccgccctcccgagactcgaagccgcagcagcagcagcggaggaggaggaaaaaacggaaacgagccccccttcaccccaccccaagtccccaacggacgcgagtagtgaaaaaggcgagagcgggagcgcggccgcgcccaccctccctccctccctccgcctccacccccattcgattcccccccttcccttctcttcttccctccccaaccgccactctcccccccaaatcccccacctctcctcgagaatggcggagtcgcaggtgagtggggtggaattcccaggcctccctcttccgttctactccgccgccgccgcgggtggtggtgtaatctggttttgggcgcgctgattgattgattgattgtggttgtgtggggggtttttgggtgggtgggtgggtgtttgtttgcaggtggaggggatgaggaaggcgtacgcggagatcatgctgaacatggcgcaggagtcggcggcgcgggtgctggcggcggagcggcgggcggcggcgctcgcggggggtttggcggcggcgagggaggacggcgtcgccgcgctcgtcaggctcaaggccatcatggaggccagggtacgccacgcccctcctcctccccttccgctccttaggtttttttttcgcttgctcctttcgttggttagttggttggttggttgggtgtttccttcgggtttggttgttcgtaggtgtggttgcgatttcggccccctttcggggattgcgagtttccgcgatttagggaggtttttgggtggtggtatttctcggaattctggtggatgcagattttgcgtttgaatgcggggatttggagttcgaattagagggggtttcgcggttccgtactctgcccaaatgttggttgggaaagctggtgctagtgctttttcatgcttctgcattttggtttatgcagtggtgttgattttgcacagccttcaaagtagaaattttcccttttcggtatctatttcggcagcctcgagggcaactaggctaggctcctttgagtgggtggtagaggggggaatggaagcacaagtttgtgtttgtgctctaactcaaattggtagattttgggttcctcagttccccaaagcatgcaaatagtaagattgttacaatgagttttgagacactagctttggtgataactgataataggtacataacgttcccattttaatgtagtgatgaatcacatttcacttctctctacttatttgtgcttttttcccctgtggtagggtgatgcatgctatttctatttgctgttatacattgaagtgtagtgaactatctagatggcactggtatttttgtgtgtggccaaatttttgagtcctgagagcaacaataggatactatatattttacatttttgtttataacctgctgataaaccatgctcctgcaaagagtgttataatacaaaaagaacactagtgcaatataggctaccatgttgtttatgcaattatgccaatttatggggtaatctcttagtacataataatataattccgatagctgattgaaatttaattgagcaattctctcaactttagtaaaccctcatttgtaaattacattaccatattttgttctcggttgatttctgcagtgcacaatttcttattgggaaatcatatgttgtagcgtcttgcctgaactttttactttttaagtcaatttttcattatccagtccatgtttaggtcatatatgtgtatatggtcaaggtttatgattgttccataattgttccaaccagtcattgtgaccttgatactttattgtattttaaaatgtagtccgtgtttactttgcgtacaaggcatcaaattgatagtgttattggccaagtctgtaccagacatggtctcctgctgctttttagtaccttcagtctattggtgcagttctgctaacaaataataactgtagagtttctttcagtttgtgtaaagcccagggtttttgttggatagcaatggcagaaagtctgccatctttacaaaagttagttaactgtgataagctaactgccctgttgagacctttatttgttatgatggttctaagaggaatgcttcaaagttattttaaatcttgtgatttgaggcaaatttggatatttgtaacaccactattgtgcctcatattggctagctatttgttaagacaacacatttgtgatatgtatattaattacaataactccatgttctgaagtagtggttcttctacctatattggagtacttacttagggtgagtgcagctgccccataggtactctttggccactctagactaaatgaactagattccattcatgaagttttcaaaaattaaatgtagttcacttagttgaactagagtgggtcaagaagtaatcgtgagttggtccttgctcatccgtactatactaatttgtatcattttcagtctttctaaactgttttctgtctgcctcgtgctgtgttcaacattgtgttgaagacaatagatgaaaagaatgcttatccgttaatgtacttgatctgtttgaatggtgaaatgttatacatgtggtggcgcttgtattttgtgatatattttaccatggcctgtgacctttgttccatttgttcggaacaacctttttcaattaaattatagtttttaaatctttttttggtaggtagaaccattgactatgtattagggctatccatattatttgggaaatgcaaatcatggttgtaaaattcattatggattctaggcctataacctggatgattgccgattcctgtaatctattctagtactggtggtaggcccagtcactgcgtataaacatatgcatatgggcatgtacgtgttaaagattagaggacaatcatcactctctgtttctgtaggccccttcttttaccagcaaacgtagcatgtctaaataaacttgatttgtttcccattaactaagcattaagggcctgtttggttggtgccctgaaggatatttgcctgaccagacgtaagcctgagaccagccgggaccttgtttggttggtgccctgaccttagtttctccttccctggcctgagctcttttggagcctcattagcctgagtcaggcgaccgttttcggtcgcctgagctccagggcggcgcagctacgctcattaatcctaattaccgcttataataatgtagtataggtactgtagattgtagaagcagccgaccatacaaatatattttatttgtgctttcaaggagggatacagcccatccaaatattttattttttttctaacactttataacaaccgtaataattaaaagcttaatcacgtttagttttcacaggcgcggaagaacaaccaaacagacaagtgttcaggctgcctgagcaggcaaaatttatcatcctatcaggtagctctcaggcacccaaatttttcaggcatgtaggtgtgggcatcaaccaaacaggccctaagtcataaaacagccttttgcctggttattgtggcccagtgttattaaatataaatgcatgtatactcaaatttgattggccggtctaagtctgtgattgcctggattgtcgcctgaaattttcttatctcaccattttaaaggcatacaaacgaatcataatatttaagagggatagactatggattcacaaataaaatgagaaacgcagtaaagcaacatcacagccaccggttaagcgtacaaggttgccaaaccttgtcaagaattgtaagcagttgatttacatggttaagcatgagcatatgcggataagcggcccacttacccggttaccccacatacaaggctgattaataggcccatgtatgactttcatttattaaaaggcccatgtacttctgtatgacttttattctttaaacctatgtttattgttcataaagaaagatgtgcctcgcatgttagactaaagaaatttaaaatctcttacacggccactttccgcataagatctacaaggtggggtgaccacactgcacagctcactgtcttagaacattgaagaaatttaaatagttaacctaaaaagaattgaatacacatggtatcatttgaaaaggtcaatgctgattacatatggtagaaatccttgtagtttattcaatggcatataagtacttacaaaaatcatttggtaaaaatctggtgattttgatcctcttttgtcctgcatcatatcctgccaaaaaaatcaagttgagttcccttgcagttatctgccatttataacatatcgctaatcattctttcgttgtttaatgtgtaagtaatcagggagagatggaaaagaccgccttccatttgaaactctctagatcttatatattttccagcaatctatgtcaaaagagcgtgatggattgggtcagtttgctgggccctagccaggtggactcgctaccgtgccaagggctgggcgtgctagttacaagggttccgtgcatgctctttattttatacccaaaaaattaaagacactgagaaggggctagggtaaaatgcgttggtcagcaggattcacatgctggcaacagctcatgccaatttgatttaaaaaaagttacttttttgtacataaagcagcttagttatttctcttttgaacttgctttgcaatcatttgttccaaatgtttacaactttaaatagatgtgtcctttctctcatgtggaactgatgcgtgtcaaaacttgtttgtacatgtgcagataaaagaagcagagtcacaatctttggcaaacattaataagattaaggaactacaagagcaattacatggtgctcaagatacagtggcctcccttcaaattgaactgcagagatcaaatactgaactggagcaagcaaggagcactttggctgaggaaagaagaaataaccttcgctcctgcaataagatcaattctaataaaaatagcagctcttcttctagaaagcatctacaaggcagagtatcctcaaagagtaaaaatacggcaaaggaaagtggagctgttgaaaacttggagacactgtaccgttgtgattctgatctgggttcattcatggctagaactaagaatcctgagctgtatcgcaatgggtgtacacaacgtatccgtgcaatcaagcagcgaagtccaaattcggatacatccctggtagaaaacagcaagcaaactagtgcactgaatagccgttctaagactggaaaaactgataccaacagaaacccacagagcacaaggtccatcatggaacagatacttcaaacaaaatttctggccaactgcaagagaaagagaggtaggcgaagcaggccaagttacatgcatgataattctggtgagcatgggcaaacagagtacaagtcgtctgatacatctgatggaaatgggtgtttgctgctacttcaggctcttgaacaagatctttcacctctaaaggcgtcttctggaagtgttggtgagggattagctgaccagaaggatgaattgctcaaggatgaaaaggatgctgacttgaatcttcaccctgcttcccctggaccaaatgatgtactttcagtaaacaacatgcagatgaaaaggaggaaaaggtctaagactatgagagtctttgaatctgattttgaggcaaaagctgcccctgaatttgggaacaccctgccaaaatcaagtaataataatagcatgctaaatagtgaacagagctctgatccacctgctggaaacaatggtcctgttttgcaatgtactgctgaaaacttgatgcacgtgactgatgctgcaaatgctgatcaattaaagtctgagaacagctccccgctagtccctcagtcaacagagagtgaaattggagatgaaggtaccatttagaaactttgtttttttaatttacaacatatgcctctgttattactttctgaatatgtattgagccctgagcatggttaatatgatgcaggtaactcgcgagtggatcacaaagagtgtagaacaccagataataatgcaatagtcttggaagaagtgaatgtggataaaagctgcattattttagcttcagatggagctgattcttcgatagtcagctccctggacaaagaagaaaatgcaaaagaagcaacttctggagttgccgtgcaagctgaaggtgccagatatatcaaatacacattcaatcgcaggaaacgcaaggccgcgcctttagacagcactcctcaaggggctgtccctgagaaaagcagtagtgtggtttgcccatctgagaatcatgagcctcatgcaaagcctgagacgcaagatctcgtcatagagtcacctccaggtgacaatcaactaatccatgttgcccagcaggtatgtgctcctctttacatttggcaccatgtgtgaacttgttcaacatctctgcactcgcttctgaaaaatattctcaccgtccaaaaccgtattgtttttcagctcatattgctgtcagcgcaaaaatgatgaaaattttgtgatacatcaaagcggaaagagggattggttcgaaagaataatgcttaagggacggctccaataagtggatcatggatcgtttgataatatgctaaatgcagttgagttcttcaacggagggggagagacttgtggtggtagcggcagagaaatcaagaaagctagcttcatagtgtagttatacctctacctaagaggtgttattatagtagtgtataaattaggcaggagttactatttattttgtagatgataaattttgaactattggtttaagaaggttataaattttgaagtggtactcagttattaagtcggttcaaattcagaggtgaaacatctgctcatgtaaagcaacttacttttctctagttttggggaaaattttggtcatttgatgggaatattcgcgcagatcgttgcacagtatgtgtgctacgttggaacagtacaagatgcgggggttcaatcaccaacgcgcgtgcattccatcagaagtactctgctactttatggccatacaattacaatcgatcttccgcgcctatgtaacatggggaggtgacgagttagtagcagtaaccgtagtttttttagtccatcacatttatgcatttacagtctatgaccgtattaatacttttgaaaggtatgttattcctcgaaatttcttcagtgtaggccagtatgctttatcagcccatacagatcggaaacagtacagttggacatcttaatacaactaaaatagttgaagtatctagatacagctatggcattataacctgaacccaaatgataaatggtatttcgtccgtttcactgtagttgccataattcctctttatagcgatcgcagagggtaaagctgaaatagccgactcgtaggtcgacttgagacgatatatatatatatatgcttagatcgttgatgcgtttgtcaatcgatcgcgttgtagcgagtgcgactgattgattgcactaatgaacaactccatccatggtgaaaaaaaaaaacaatttctaactttgaatctatacaccctctatattcaaatttatagtcaggaattgatttaattttttttaaggatggagggtgtgctcaagtacatatctttctgtgccgctagctgaaaagcagcctgaactgaaaacattcaccatatcatgcataacatcagagtcagacacatcaccatgctctagcctactcgatttacttcaacctaaacatgagatatacctccgggtcgtactttgattcaagatctgcagtcaagtacacttctacaatactcactccgttgaaagatacaaggcagggtttcacttatcgcatgataatcacacgattatcgcgggggtacggtaggagaaatcgacgatatggtttggatgaattttgaccaaattcaaaattccggaaaaaataaaaaaaaattgaaaaaaaatcatggatatggttcttgatttgtaattgtcaatggtgaagaatttttttgaaatagagtaagctatattcaaatttgagggcaaaaccgagaatagtttacaaattagaaaagggaagataatattgggccttaagtatcctacatattcttccaattattcttaatttctagttttctacacatattcaaccgtattttttatttttttcccctatttattttgtatttacataatttcagctacacagcccgcgataatcgtgcgaataccgtggttatcgcggtaaaccatgcgattatcgtggtgaaaccgcgaaaccaccgagttttgaattcgaatttttggatgtgatttttgtgtgattttagacgattatcacgcgattatcgtgtttatcgcgctaccgcagggtggtggttatctcggcccaaacgataaggtaaaccctgatacaaggtctatcagttttaaatagacttcaatactgaactttgacagttattttctttcaccatgtttcatcaatagtacaaaattaacatgataagaaagcatttatataaatataaatccaatggtatcacttgtgtcactaaacatattgtattgcctttttttttccaaatacataacacaccttctatttgattcaacaaatgaagtagccttgaaaagggcaggggaggtccttaactagtaaactctgacattgtgtgcaccacgatatcacattagagcacccttggtttcaatctgtaaatattaactgtaaatagatttgcataatttcactgtcctacaatatggaaagggaaagcataaatcttaaagcacaatttatgcacatggaagtacctaggttattctgttgatcatttgctacccaaaatttcagaaaagagggtaaattagctcaacagaagcaattgtgcatgagatacgcaaaggaatgtagtaccattcctatgtggtcacctaattagttaagtactcacaatgaaaagacaacaacttcatcatatgacggagataatttaagtagcaaatccagcccaacaaataatgaaccgtattttagagagaaatagaattttaaaacaaaaacgaaaatatcttgtaaaaacagcaatatcaaatcctttatcaatacatttatacactgtccaaagtggtaaacaaacatattttcttcataatccagaacaatatgaaacccaaagcgaagaaaaagaatgcaccatatgagaagtaaacaaacatctttaccaagaaaaaaaagtccattttacttccccgaactatttcgcctgaccacttagccccctaaacaatttttcagctcattaaaatggacctttttctttcaatgaaatgaacttttttctttcaacaaaggctgatcttacaatataacccatatgatcgatttaggaattcaaggtttatcaccgtggttacatgttaacccattcacccattcactttactaggattttcaacaaaggttgatcttacaatataacctatttgattgatttaggagttcaaggtttatcaccatgattgcatgtggcttactgctacctgatggtgcttgtgcattctatgaaagtaaaaactaaataccaagagggaaggagcaaggtaccatactcaattcgaatgactgagatttaattccttgggtagatatcttgaaaagatggagggaaagaattactgatgagcagcctgaaacatgagccaagcgatatctaatagaaaataatagcaaataacaaaacaagtaaatgttgcacgctggaacagaaaatgacctggaaagagatgcatttgtccctagataacatactactagctccgtcccaaaatacttgttgctttattatcaaaagtactttaagtatcacttatccttttttatatttgcactaatttttcaaataagaggaatggtcaaacgttacaagaaaaaagacaaagtgaccactaatttaggacggaggtagtactagataaatccaatttaagtacacccatagacaaaggcatgcataattcgtcaatgataagattacctattaagaaagaccagaaaaatgtaactagaaagtgcagaagattgaaagaaccataaagggtttacaagctaatacaacatagttactgagtagataatgtggattgtggagaacaaatagcagatttcacaagtcgacaacaaacaccctgtatagctattatttatagactcccacaccatgaataacaaagggtcctctcagcaacatattcaccatacacaaagcaaactcatcaaaagtcaacaaattactggggaactttctattacgattaaacagcctatgccgatattcacatttctttatatgaaaaggcaaacgtaggtaacataccaaacagtaccatgcatagagaagaactgtgatgattaactaggtcataaccctgccatcttagtatcttggacccatactacaagaacgggacagacgtaaattccccatctcacgttcacttccaaccgtttctccacctgaagaagctgagatgtactgcttcctgcaggcaggacagcgcccatctgcctcaagaattctcttgtggcagaacagacacagatgaaaaccgcaggggcaagggaggaagcttgaatctgttggatcaaggtcctcgtagcatatagggcaggatgtcggctttgaggggactcccttttgtgcagatcctatccccattgccacccaacagttacccatgctagctggaaagctgacttgtttggagaggctgggtaaactctgtggacggaatgcatcatctgggctccaagctcttgtactactcttgattggttcttgccttgttgctgcattagcgggcactggacaagatgcaggtacaactggtggatctgccggcactggatcctggtgattatggttgtcatccactgagagtgcatcggcaacagcttcccaatcatccaaaactccatcatcatcattctcggggctaccaccagtgtcatcgtcagaatcagtcacactccgagagctggaccaagcactgctgccgctgctgaagctacggccaccaccattgcccgagcagtgcttctgctgcaagcagccaataggagggttgtaggagacagggctgtgcaacggagactcatgatcactgctaccaacatcctggctagcgccaactgaatcctccttgaaatcctctggatccccttccctcgtccgaatctctgcacgccggcgagggagtggagggtgcggggatgcgaggatcggcgacccggagttggctcctgccgctgctccaggggataccacagccttcacctccttcccatccttcactagaccaatccaaacagaagatggatcagattctgagcaaatggccaaatgatcaactaatgattgaagctttctcaccccagatcccaaatcaagcaaaacacatcaaaatgggaccaaaagaccgaaacaaagattccaactttctcacccgacagcgcagaattcatcaaaagcatcgcctaaaaacccatcaaagcaaaaaaagaatagctctctttaggcagactccaccaatacaatgaaccgaatttgagggcaaattgaaacccaagatcccaatttcccccccccccccccccccacccagatcacctgggccgacccaacaacatccaaaatcaaacatgattgggaaaacaaaaaaaaaaaacagataaggagcgcgagagatcagaccctgcgaaagccactgctcccgccgcacgtcgagcttgctctgcttcagcttcgccgaccgattcccctgcaaaaacagaaacacccaccaccaccaccaccacccaaaaaaaaaaatccccacggatcagcacccccatctcatccaatcgaaaacatccgaactcgaatcggagagaaccccccacccttatccgcttcttcttcgcgtcgcgcgcggtcgacggtgaggacgcgtcgtgggccatggcgtcgtatcccatcccctccccttcccttctcccttctttacacactgccgcagcacacacgcgctcgcaacctcgccgccgctggagccggaggaggaggaagaggaggaaggagaggaggagtaaaccctagcgcgagccgagacgaggcggaggaggaaggaggagcggaagctgcagctgatgaggataatacggcgtggagaaaaacgagtcgatgagctgacgcaaaaataaataataataataataaataataattaaaacaaaacgttttctgcttccgcacgacgagctggacgacgacgacggcggcggcaacgggagaaatgacggaaatgccctcctccgccgcggcggagcgcgaagcggtgtggggatgcatctgggccgtcggattgatacggtcggtgccaatacgtgtggccgggcagcatgccacgtcgtcagcattagtaagtgagagggaggatggatgtgctggggagaaaatagaagtgtttttgttttgtcccgtttagattctaacttttttttttcaaactttcaacttttccatcacatcaaaattttctacatacataaactttcaacttttttgtcacatcgttctaatttctttaaacttctaattttgatgtgaacaacacaatccttgttgaaggaaaaagattggaagtggttgcgtattctgtaggattttctatcacacttttcttttcaagagttgcagggttgacctacaggagatatgattagagtatttggtagtacgtcgaatgagttttatgcgtctcgaaatttaagtaaccattcaatgcaatgtcctaacataaaaaaaagggtgaatagccaaagtggttctccaagtttcatctgagactcagtttagtccttgatgtttcaatatatccatattagtccttcaagttttcactttagttcaaacttatccttgaaccaacaactctcttcataaatgacacttatacccctcatcattcacatgtataagagagaaattgcatgcttgaatttttttatagataatgcatagtatattatgtaaaacgaaaaaaattatgtactagcaagtgtatacaatagcaattgcttaagtttcatgtgcatatgttgaaataatgggaagtacatctgtaatattgtttattcaggttggctttctcttttctattctagtatatagatgtatacaaattaagggcaaaaatgacattttctaatagaaatattgactagaaatagccatatggcatattaagtggacccaaggatgatttcaaaccaaaacaaatatttgaaggatctatgtggacaaaatgaaacgtgaaggaccaaattgagccttcgctgaaacttgagggactaaattagctattcacccaaaaaaaacttaaaatatgccggacggatatgatttagtagtgcatgcgtaactgtgtagatataaatgaagatgcaatcctcactgacttatacaacgatagtggtatattcttaaaaaaaataaaagaagcattttcaatcctagcaaaaagaaaacgaaatttaagtagttattatagtgttattacattcttttataaactacattctgatacctatagcttctctaagaatcactctaaaactacattcttttataaacaaatgttttatggtctatttacgggagtttctgatacctatagcttctctaagaattacaaacttccataaacaaatccatttttctttgttgtacaaagaaaatgaacaagaagtcacaagctagttgcttaagttttaatttttttttcaccatctagattctcacgaggtgcttctcgtaatataaaactctacaaacaagcccttaagtaaaactacactcttctatagatctttgagagagagagagagtgtgtgtaattttatcacaatcaaatacatacattttccatgtacacttattatactatattcctcgtcataactatttggcgtgcatttagaattcacctaagattttataattaaccattaattttatattaaataagttataaatctaatacatttatgatattatgatagtacttttcaaaataattgtgcacatattgtttttatttttaaattaattatcaagaagttatcgaggataaatgtcctaaaagtttaaacatgccttgtcataaatgtactaaacaaagttttgaatctacaatttacaaccaactaaacctacaactcaacgtacaaacatgtcacgtcatcatccactagctataattgcatatcaaactcacaagcatgtaaaatcatcgacaatttattgagttctacaggtcatacatgtatatctaatcatcacccctcatatcattttcacaatatttcaatatatctattcattatttttacaatacttaacaaatatttatcaacatattctacatcaaagtgcgaggtactatttagtttgtttcataattagagcatgtttggtagagctcgtctggagtggagttgtggagctgcctaaatctaactccatctctctagtttattttgtgagagtgctccacctagctccgctcgtttaggtggagctaaaactgtttagttggactctaactccaaaaaggatggagctggagttgaagctatgccaaacaaaaatactaataaaaactgatcgtatttaacaaaccgatctccgacagttaaaaaaaagcgagctgttttagtgaaaaccgatcagttttattaacattgacaatgtgttttcatagaagtagttctgaaagcaaaattgaaagctctgggaaatttacaacacttttttttttcaaaatatcttcacttggcaaacattacctcagctcatctatctccattaacatttttcaggagattgaagctagcatcatatcatatcatacactgcactctgcacgaaaactgctacgcacactacctcaaaaacccaaacctctatactacgattgcacactaacattcgtacacactacacgtctacacatccatcccttctacggcctccttgaccacgacgaagtcgtccatctccttctcctcgccggcgccgccgtccttggcagcggcgggcgccaccaccacggcggccgtgccggcgggctgcttgtactcgtggcgcctcgcgaacacgaggaacacggcgaagttggccaccccgagcacggccagcatccagtagaagaggtccagcctgccggcgtcgaggtcgttccgtatccacgccccccgcgtggcggcgtcgacggcgaagacgaggaagctgctgaggaagaatcccatggacagcgtcaccaggaagagccccgtgctcatcgacttcatccgctccggcgcctcgcggatgaagaactccagctgcccgacgtacgcgaacgcctcgccggcgcccaccaggaagaactgcggcaccagccagaacgcgctgatcatgccgccgccgccgccgtcgttggcggcgtcgcgccgcttcttctcgacgagcgcggaggtggccatggcgacggtggcgaggacgaggcccgcgccgacgcgctggagcgaggtgaggccctgggggcggcgggtgaggcggcgggccgccggcacgaggacgcgctcgttgagggaggtgaagaggaggatggagaggaagaggaagacggagagggagcccgccgggatggcgaacccgccgggggcggcgcccgggcggaggtggcggtccatgcgggtggcctgctcgacggagaaggtggtcatctgggagtacaccgtccagaagaggatgcaggtcgaccagatgggcagcagcttcaccaccatcttcacctcctccacctccgtcaccgtcgccgccggcgccgccgatgtctggttcgtcttcgccggcgacgctgccaggtccgcctccatgatggccgccctgtccaggcacctgcatggcaaaaacccagtcagcaacgtatgtacggatccaagtatctaacaagctaggtagcaagtaaaaaaaaattgacacgtgtgtacatatatatacgacagagatcatcagatgattttcagttgtgttcgtgttagcaaaacgcagatgccagatggatgtgaataagtgattttcagatggagatttaacaatagaatcgttcttttgataagtgtctctctcttcttcgatggtggccggattttatccattatacaaaaaaagatggatgtgaatgattgggcatcttttgtgatcaaaatgaagcgaattctttaaggatctgaacttctctagcaatgcacgtataggccggccggtgcaccaatctgactgtttcagatatgcatctcgagcctcagttaatgcaatttgtgttgtgtacacaacacatccctgtgtcaccaccccacatatgctcgcgggcacaatgtcaaatttattctttttatttgcatatatgaaatttggtttacatgcttattaagtgaatatatcatactaatacatcttgtattttttttatatatttttacttttaggtgacggaaataaacgacaaaaaatccacctctagactactgaattcacggctcgtcactctacttgtgatctgcttcgtccatcagccggccgcccaatttggtgaatgttatctctaattaattgggtgtctcacatactaattgggtgttctaatcaattcgatgtctcactcactttgaccactcattcatttcatctagtaccatgcatgatttgctcttgcgtgctgtgttagcaagagggcgaactgagttgtcgtcctcagcttcttctctatagctcgtgtccatctcagccttgacagtgacctaaccggtgaagccaattaagtaccgtgctaataatagattatagacttgtgatcgatagctagattaaccctcatgcctaggtagaagtacatactactagctagcaagctctaccagttcacatcctattggcaccagttgatactaaccatggaaaggctatgtggctagagctgaaaaaacggagtgttttgaaagctcagttctgccatgtattttcaaacgatacgatcgattgatagaatttaaatagcaagcaaatgttttggcaaaatcagcagccacaagaatccaatcctgaaatctgaaccctgatctcctatatgcaccggttgacagcagcagtattgtactatcagcagagcacatcgtgtcacgtaaactctgaagaaataacattcatccatgtctacttagcaatataatgcattttgcatcccaaccaaaacatgtttcttccagctatatattaatcaatcaacaaagctaggacagcaacgagttaactactaacggatgatgcctgatgacaaccacgagtgtatgatctgaagctaattttctatagtcgaggagatcatatatctaactgaactttgtatattattaggagaaaagagaaccacgtggcgattatacattctacggtttgagactgaggtggtattcttttcttctgaagatgaatattaagttttttttacgtaaaacgagatgatattaacatataattgattttgagttttaattatttcaaatttaaaaaataaattaatatgatattttaaagcaactttcatatagaaagttttcacacagaacacaccatttagcagtttgaaaaacgtgtcacgaaaatattaatctccattcaactcttgtgggagaaaagagcgggatctcccctcatgaaagattgtgcgttgattacctgaggcggtcggtgtaggcaaccttggatgtgtggtagccgtggagctcgccggcgtcggcggggagcggcaggcggcgcttcctccacgccgttgccagcacccgcccgatcacggtgagcgggctcccctcggggcggcggtaccggtacttgggcgtgccggcgacgaggacggcgacggcgaggaccatggcgacggcggagacgccgtagccccagccccggccgacgttgtcctggacgtacaccagcacggtgaccgcgaagagggagccgaggctgatgcagaagtagaagcggttgaagaagaacaccatggcgcgctcctcccgcgggtcgccgccgtcgaactggtcggagccgaacccggacacgttcgccttgagcccccccgcgcccgccgcgaccgtgtacagcgccgcgtacagcatcgccagctgccccccgcgcgccggctcgcaccgcaggtgcgccccggcgccgcgcgcgtccgcgcacggcggcggccgcatccccggcaccatcgtgtccaccgtcagcaagctcaccccctgcatggcagcagatcgtagtgagattcctgcaccgcgcgaggatgatcgaagatgtgttgttctgtgtgtgcgagagcgagagcgtacggtggcggcgatggtggcggagatggcgatggtgaggtagcggccgagcttggcgtcggcgaggaagccgccgacgagggcgaggaggttgagggtgcccatgaagttggtgacgatgttggcggacttggcgttggagaggtgcaggtcgccgacgaggtacgtcaccaggttcatcgagatgcccatcacgcacacccgctccgccagctccgtccctgcaaattaacaaccaccgccgccgccatggcatgtcatctcgagctcaaatcaaccaaactttttcccacgatcgaactcgcgagtcgcgaccagcagtgaagacgacgcgtacctaggataagcccggcgccgagccatcccccggtcttggacttgtccaccgggttaccccggtagtcgacaaccatgccgtcgtcggcgccaccaccatgacctcctccggcagcaacctgcacaaacatacatccagcttaacaactcaatcaccaaaccaaaccaccaatgaaaacatgcatgcactgtcggtgtgtgcgtggtggtatatattttttttctagttacggctttataggcttacaggattgtaatcttgttatttttttcctgctctaatagaacttcgtataaaaaaaatacatgcatcctgctgcatgcacagatacagcacaagcaagcattgtttatgttaccattttcttctgctgctgagatgcactgtctaccgctgctgcaagcagatgagaagagaaggcagcaggcacaggatagtgaggagagaaaacgtttgtgcagtgaggatgaggaggccggcctgatcgatcggaggatttatagagtggaggcgtgcagaggtggagaggttttgatcgcgagattttctctcgcaacttttttccttttccgcttgttggtttcgggtaaggtgaggtggacgagatgattgctgcacgtacgtacgtacgtacgcacgctgcctgcccccgcctttggcgcggaaaggacaagtaggtgatgacctgctggcgagttgtgtcgtgtggagggtggcctggcaaaatctctgggtgagggggattttgggccacggattgcagggctgggatcctctgcatgtgcggccccggtgaattgaatggaggtgtttggtttccgtgtcttttattatctacagtaaattggattcatgtcattgcaaatatacttatttagatgaatactttataactcatctatttgtagccatgtcactatcatcacgtttttcatccatctatttttttttccgttttcttctgtcttcttcccttgagcgatggcgatgaggtggcaacacggagaagaagcacagtggtgttgtccttgccgcacgacttgcatgaccaccaggccgtggtggtggtgtcgtcattgggtactgcagcggcgtccgccttcatctcgaaacagtaggactgggcattgtcgggcacggcggtgggcagtgttgagctcaacttccttctcaccacaaccgtcgcgctgttgacgccacgtgcaccaacgcctggcactactgcttccaggcctgctctacaccaccacgtcgacctctgtattcgctccaccaagtggctcaccgacgtagcttctccagcctggcgtgcatccactcgttctccatccgcaccaccgcgtcaatctctgctctttgcaggcacaactccgacactagtgcatctcccaccgctgtagctgaggcggccgaccaccctactcatcgacgtcatcgtcgactccaccagtgcagccgacacaaccagcttcatcatcctcgagatcgatagcagcaccgcagacgataatgctattgttatagcaaccacctgctgccaagaacattgctcaaggaaaaaggacgggagaaagaaggaacaaaacagaaaagaaaaagaaaagatggatggaaaacgtgacggccatgatactattttttttataaaattttatgaaagggtatgtagcctagtggttacaagagcatttaacggtatcgcactttcagtggtaggcgatgtatacatcgacagacgagtcttgttaatgaattactgatgttggactgtttagctaggtgaattaatgcacagaaacagcatctattttgcttaagctggcttgtttacaaaaaccgagattaggagacggcgtcgcaactcggcacagccaccgcggggactccgtcgtcgccgtccgtcctacgtgtgcgcgcgcggcaggtgccgccccgcccagcggcccacacgtgcgccagccgcgtacggcaccccggccttcaccacccacgtgccagcctcgggttggccgagagaggcgccggacgacgtggacaggtccgtcctccgtcaagcagggagccgagccgaggactgcggagatggacagcccgtctgctgtatgtacgcgcgcgcaggcaggtccatgtggctgtggcctgtggcacgctgaaaatctcgccggtgaacgcgagcagccaaacagcccaaccaagtaaccaaactgcatgcggtgggtggcatatggctagggtgcgcagaaaaagatcgaaccaaaagactgaaccgaaaagaccgagaccgagaaattcggtcctaggtagtgaaagaccgaattttgttcggtcaattcggttagtctcatcggataaccaatagaccgaaaagaccaaattataaaaaaaagtctaaatgcaacctacaatctactatgtttaataggattaaactctaattttcacatccctacttcttctaggcatgcagcttaataggagtctttactcataagtgcttacgaatttttttaaagatttttatgttaaaaatttccattatttctttgcatatatgaaaatattgttgaatttcggtcaggactgagaccgaatttgtcggttctgacatttttgcgctgaaattcggtcttcactttttaaagaccgaagactgagaccgaaattttcagttagaccgaatgcccacccctgcatatggcacgcaggcgcagcgttctttttgtcgcgtgttgcatggctgaaatgtttttttttttctcatctgcgtggtgtgttttttttcctcttcggcgtagggttgaaaagtcaccggcacgcaggcatgtggaggcagagccgtataagcgtacaaccacatggtattttaatttctttcgaaaacgagccaccacatgatcttttgctcaaaaccggcaggggctctgctccgccgctgcgacgtgcgtgcgtatgccatcttcttttgtctcttctccttttgtggccgtgcacgcatcggcgcgcgtctctgtctccgtggcgagaacgcgtcttctgaaccgcacgatcgccggctaattccacgccgtgtactggtgtgtaactactcctacgtggtaatgcatgatgcaaactacagaacttcatttgttccaaaataaataaatttaatataaaatatgatacattctaataccataaattcagcatctgtaatactataccaatcttaatatcttatactccctccgtattttaatgtataacgtcgttgactttttgacaaacgtttgacatttcgtcttatttaaaaaatttatgtaattataatttattttattgtgacttgatttatcatcaaatgttctttaaacatgacataagtatttttatatttgtataaaatttttaaataagacgagtggtcaaacgttggttaaaaagtcaacggcgtcatacattaaaatatggaggcagtattaaatttgtttactttaatatgacttaatatagaagaaaaaactccactaggcatgattatgccatgtgtcacttgatgctgcctagtcgtgaccatttttgaaaggatccatttgtcgtattgaagtaggagcaactgaggaaggcacaacggcagattttttctgtctccttttttgctgatatttttgttctcataagcagcatatgcgagctttatgattaggcccggtcgattcacgataagtagataagaacacacaccaaaacatttatcttcattttattacaaagagacggcacagcagcacaacgcacaaagagatgaaacgatagctcgtggaacacttgtaagcaaaccgatcgaccgatcatcgatcgttagcactgcagcacggtcactcgtttataccttccaacatctcttgtcccaatctttatcacgatatctttgttttatgctttcccctttgggtcatcctaaaagaagaaaatatagatatggcctaatcatgatatgttcttgaatattctcaaaatggacacattaccccatctagaattctagatgatcaggtcggcacatgcctatggattaaagcatatgctttgattttggaatatgatatgcatggatgcttcaattaaccagcctatcacaggggtgaacagtagtggacgataaaaatgaaaaaacttcaccccagaacaaatagcaaagaaattccacttgattatttgactcacacaacctgattgaccgtccggatgtttattagttattactttctccgttctagaatataaaaaattttagagttggacacgaataaagtaggtagagttaaatgaaaaaagttgtgatggttgagaaatggatgtagatgaaaaaagtgaatagtggagggttatgattggttgggaagagaatattggtagagaagttattatattttaggataatttttaagtgttagaagttgttatattttgggacggagagagtacctctaatccttgattcttttaaccacgactacgatttcacaaaatgtcacacctaatgacctatcattagtttagctctgggttctttttttttttcttttcataaatattacaacacgacatcccatccaaacgatagctcatatatccttttttccctagctccctcttcctctcccactccctcctgcctttccccacttcctcctgccttttctcctcttatgcagggaggccgtcgaggaggacatcacctaatgtgggctcctcctcccgggtgcgttgtcgaaggtgattgaagggagaggccagtgaaagctactagatttggagcttggtcagcaacaatgtagtggtgatgacatcatgctccttgctagtattgtgtgcgggtacatcatgtagcgcagtagtgttaatgtcaaaatttgataagcccgaaatcatcattagcttagagtcaatattagctttagagtacaggaatcagccgatggaagtcgtcaagtcaccagtagttgtgttcttgatggagtcggatcaattaaaagaagcttatctagaagagtccgagttcaaggataatgcggcatggcaagttatctattaattaggaatagtttattagttttcttttatctttaagaaagtgtgtttagtgtctgataaggactttatgttttccttttatctttgggaaaatttatttcttgtcctacaaggaatattatctccccatgggtataaatatgtacacccggggtcattgtaatatatctctccatcaatacaactgctctcggcgcatcgccaccttctttaccgaggtttttacttatcatccgacggaacttggcacctgacgcggggctgcattggtttgcgatctccggcgaaggggtaagtcctacgttctgccggccctggtgaatctattgactacattagtgttgttcaaggctgcatcgcttcgatctcttggatcgctctggtttggttgatatatttgcttacctgatatctcaattctatctctaattgcattgtgtttagagacgcatcggtttagttggaactgtcttggttaggtctgatcttctgtcttagccgatatatctctacaatcacaatgctgttgtaaatagatttgttatatccatcacattagacagatctatcggctcatcgagtattagattatcatatacaatctcgtgatgcatcggttaggttcgacctactagattgttgttgataatataaatcttgttaagctgataggttcatgctaatgttttatcggggtgctagccgataagttatctggacgttgcatcggcttgtaaggattgcatgtatatataagttggatttagccgatcgcaacaaaggttttactgtttaatctaatcttgtggattttatgacatcagacatccagccgatgtatgctttaacctttggatcagtgcttattctactatatcatattgttagctgattggtttctactggattatattatcatcagccgattgcctttatatcattatctacattggacatatagccgatctctcaaaaccctatcgctatcggctggcatcggctatcagctggaattactccatcggcttgttagccgatcggctatttgattttcaatttatatcttgtcatttacagggtcaaactggctggcacgcccgcatctcatcaacctttggtcctgcactggagctaagcagatctcccaggccagtgtgtgtttttcgcgtcaacaagtagaggtcgggttgctcctttgtaggaagtaccaagtctaccagtggtggcggtggcggcaacagtgacaagagggcgaaagagagataagggcaactacacacgtcggttgtgctggtagttgccactgtcctcatcgtcggcaggttgcagttgtcgcttgcggggaggacggggaatgccaaattggcatggaggacaacagggaaggcgatgatgaacgacgacggcgaatgggaaggccatggcaagagatatgtaggagagagggggacggggagaaatccgttgtgggacccacaaatggttagccaaaatagcatggggctagtgcataagagagtttggctagtcgaatggcttatccgttcgattggtatggctgttaaagttgatcttaattgacatataaaatcgacccgccagatttttgtgggtgagctgaacccgaatatcagtggaatattaccttttgagccaacccatcccacctagtcataaccaaaaccaaacatctataaaaatataggtttgacccaacccgaccccttcaaccaaatacatgcaaacatatctatgtaaaattgttaatagtactttgggctccgaagaaatgaatggtgtaactattttttttttttacgaaagagtaactaaaaagttattagtaatacatcgaacaagagacatgctctaaattaacctagaaactaaggctgtgtttagttcagcgtaaagtttggattttagttgaaattagaaatgatatgactgaaaaattatgtgtgtgacaggttaatgtgatggaaaatgactgaagttttggatctaaacacaacctaatttaaaacctgctaaaacttgcgagaagcaaacagagtccaaacctgccccaactgtcagactgtcagtccaacacccccattcccgctcctccggtgatctcccagatccaccaccgcgacggcagcgtcggcgcctaccgcgcaacgcaagcaatggccggccgcgcccgcccgcagccgcagccgcagccgcactcgccgtcggcctccacgcggcggcgcgagcggtggctggtcgtcctcggcgtcgccctccacgccgtctacatgctcagcatcttcgacatctacttcaagtcccccatcgtccacggcatggcccccgagccgccccgcttctccgctccccccgccaagcgcctcgtcctcctcgtcggtgcgtcccccctctactcatccccgacgattgtgaccccccgatttggttgcgatgtttgattttggtgaggattttttggttgcgtgcgtgcagcggacgggctcagggcggacaagttcttcgagccggacgagcgggggaggtacagggcgccgtttctgcgcggggtgatcgaggagaagggcaggtggggggtcagccacgcgcggccgccaacggagtccaggccaggccacgtcgccatcatcgccggcttctatgaagaccccagtgctgtcaccaaaggtgtgccatcccatctcagctctaattctggccatttcttcatgttcaatgcaaactaggatgtcagttggtaagaattcaaatgtaggggttattactagcttgttcatgtcatagctggtagacacagatatggtggtccaaactccaaactatttaggaaaaccatcaaacatggtatcttcggtgctagctagactgctacagtaagttcagtaggactagaatgcaatgcggtggcatggtactcagagaagtttcagctctagttctagcgtgccgctactggttatttttcatgtttgatgcaactaggatgtcagtcggtaagaattcaaatatatgggttactacctagttcatatcataaatggtatacatagattatggtggtccaaaccatagaggaaaaaacaccaaagatggtatctgcagtgctagctagactgctagagcaagttcagtaggactagaatgcagtccggtggcatggtgctcagagtagccgaaacctttaattggctctgatttagcgaatccttgttagtagctatgcttcttctagaaaagttaaatataatttgcttataggttaacttctattttgcagtattgtacttagcggctgattttcttagcctttttctgtggtgttcagagaaaaaggctaagaaaataatcattcccttaccagttacatattcattttttctttgaatttctaaatattctggtaaagttcaattaaacttgctgtaactgaactttaccataatatttacaaccattcccgctgatacctgtggtcagtgtacaactatagtattagtgctactagttttccgctgacatggcatgtcaaaactcatgtactggtatttgttcagttgtagaaactgtgagcattgttctacccattgatatcctaggttatcttgtgctggctgtggcctgtgggctactttacttgagatttattaaggacctattttgtgttgaaaatttgggatacacggtccgttcagacataatttagaaattgatgatatgttttaagagaatcatgttttaattccatatcaaatgtctgtaatgttcacaaaattttcttattacttttttgcaggatggaaggccaatcctgttgagtttgattctgtattcaatcaaagtagacacattatctcgtttggcagtccagatattgttcccatattctgcagcagcctacctcacagtacctggggtacttatccccatgaatatgaagactttgcgacaggtcagatttaatgcagtacatttaggttgctgaattatatatttttttatttccattcggtttttgtgatttccagagaatcatcttctgtttttattgacataattagaaattttttgtacctactcattacttgtaagttgtaacacacaccttttcggagtattccaatgactctaaaagtttatcggcagacttaatgatgataatgtgtaataaatggaaaaagggctctatagctcttctcttagttttggttagagttttttttttaaaaaaaatgaaaactcacaactattattgatgaatccagcaagcttttgtacaagtcatgggtccaaacttgtaaaaattcacaagaagggatttacacgtccaccagaaaaataacaagggatttacctgtccacaagaaaaataaaagtatttttaccaaacatcgcagagtatgaagcatcaaggctctaccttttgaatttggtttgctttggaaccttgtgtttacttgttctgagaccttgattgcagatgcatcattcctggatcattggtcatttgaccagtttcaaggtcttctcaacaggtcttttgaggatgctaaattgagacaattgctcctacaggataaattggtcatatttctgcacttactgggttgtgatactaacggccatgcacatcgaccctattcaaacatctatcttaacaacgttaaggttgtagatcaaatagctgaaagtatgtacaatctcatggaaagctacttcaacgataaccagactgcttacgtgtttacagcggatcatggaatgagtgacaaaggtacgcatactcacaatggtttcatcaattaatttcaatgacccagccttatatggtttgacaattcatgacatgagatctaaatactttctaatgcacttatttttgttgaactttccctgagacagcctcatcagaatggtgactgtcttttacctgctactaatagcaatgccttattcttttcatattaggttacaccatgttatacattatttatgatgtcaatataactcaaagttctactgataggaagccatggagatggacacccatcaaacactgatactcctcttgtagcgtggggggctggaattagaagcccaaagttcttggcctatacagacaaacctgatgatggctttcggtttgttgatgaccacaaacatgatatgcccacaccacaggattgggccctcgaaggatttgaaagagtggatgttaaccaggctgatatatctcctctaatggtttaaaattttccctaggcaaacatattatcatttttccttcagcataattgcttttatcctcaattgtttacaaaaactgcaggctacacttgtgggtctgccatgcccgctgaattctgttggaagcttacctacgcattatttgaaattaagcaaggtcagataataaacactgaaatattatgaaaaaaaatatgtttatgcttccgttgttttctgctcttttggattttctgtttatttccccattatttctgttcaggctgacgaagttgaagcggttctagccaacacaaagcaaattcttaatcagtttcttcgaaagtcacgtatcctttcagaacatgatttaaattttgcttactccaattgtctaaggtccttggatattcttttcttgatggtctcctgctgtcctgctgaagtgagttattgatgagactatataattattaatctgctgttgaagcccacagtttactagctgtgagcctgtgaatatcatgtcaattactttctatatttttatgcaacattatactgcctccgaaatggatatggtggatcatattcatactcgtgaacatgttttccctaacctgtctcagagatgaaacaatcaagttcactctacttcaagccttttaagccactggcaaactattctttagtccttgatcaaattgaagatcttatatctgcaaaggactatgaaaatgccatgaagcattctgaagaactccgaagtatggctcttgctggtctccattattttcaaacatatgactggttcatgttgatgacaacaattacccttggatatattggatggatggtgaacctcattctacatgtgctacagtcttatacatcatttcctgctaatcttcaaaaaaggactcaagtgtatgctaagaacacctctgtgaaagtaagatagccaacctacctgaccttcagttcttcacttaatgagtttatgtctaaaattgatgtgttatgcatgtatttttatgttgctatcttttccagattactcaatctggagtgtagtcaacattttttttccaacttcagtatgtttgtttctatccatttttccaagaaccttttctttaaaaaatatatcagaatttaggttctgttaaacttcttattgtatttaagaggtttgctgctgtctagagctacaggcatttggtagaactctgtgcacagtataggcttgatactagttcattgttgtgaactgttcaaagttgctgttcgatattgcagaattttattggtgtgtgtttcttattaatcctgatgtgtttttcttacactattttggtctatctcatctctcctggttgcaggtatacatagttggatgcttcattatgggtttttcatccattatactacttttagagaaatctccacttctttatcatgcttatttatttatgacaatattcctttggacaagaattgttcaaaattttgaattcatcaaggcagtatggagagaattatctaatatgccattcaagtacaccatgaatcttctgaacatttcagtcattgcgctgttcatattggagtttctggtatgtaccttttgttattggcacccgaagcgtttgaggactacctagatttggcatgaatttcgatgctttctgtgcaggttatgagcttctttgataggaagctttatacttggtgctttttgatccttgggatacttgcttcatcttgtgttgcaatatttatacaagctagctctgcacttgcagtctatgtgtggctttcatgctggttcctatctttattcacattgatgccagctgaaattccagaaaacaacaacttggtgtatgcttctttggccgacaaccccccacccccttccttttttttttccattttgtcaatattagttgcgtgttcattctgtcatataaaattctcttttctagagttaatgcagctggtagcccttattttttttataattattacgagcgtttggttgaaactttggtctgatgaatttttatatgcagaatttttagtggggccttgataatactgactgcaatggcatcgagatggatggccacaaataataacaacttttggctatatcttactcgagcaaataaacgggatcctcaattctctaagctattttttgttcaggtgaaaaatgcaggcaattctttcttgatgttggtatttgttttgtggaagtaatattttggaacaatgttgactgctgttacaatgctttaggttgtatttgttgcgatatcttctataatggtgtggatatcgacctcgcaccggtctcagaacaaacagctgcacccattgcaccagatgatcaactggttaatagctggtaagtgatgatcaactgcaccctctcatctctgctgctaatttctccaatgtttccctggttgacttgtccatgtcccttttcagtttttcagggccatatctgatatgttaacttacaagtgaaaatggctctttaacagataatcttctctagtagttcaatttcctaacatgcgtgcacattgcgccaagcttgaatatggtttgttcagagcattgacaactataaatattccctcagattacatagcattgttgtaacagaagtacctctgattccaaactaagccgttctagatttatcaattctttcccaaatataagacatccaagaacctcaaggcagttttcactcctttttttccccttctttgccctagctaaataatcgttattattctcatcaataaacgatacaccttttccaatgtggtataaatggaaggcaacagtcatttaatttcttaatcttatgcacatgtcttggaattaaaagggagcgcaaacttatttatgcatcaacgatccatttaatcaggataattatatcacagaattgagaacttccccagacgatgttcagtaaccaccttctttcagggtaacagcaggggagagtcataccaatatacacggtacacagaaagaagcaaaacttaatttatcccaacctattggaagttgccgtgaccttagtcagagtcattttatcttctaaaaagtatatatcagttaacaaagattttttcatctaaataaagttatctggcagcttaaatatgaattgatttgtctgaaatcacaggccaactttactctttagttaatgttatggcctggtctattgctcttgctaaaattctaagagttttggttgtactgattttgtgctttaactgattatgttttgacaggttttgctatggtgctaccacttttttcaccatcaagtgttctatctcgccttacatctatcttcttgggatttgctcctccatttctattgctctctattgggtatgctgttaacttctcttatagtgtccacatatatcaagttctggttgccgtaatgttcatatattcatatatcatcaaatcttgacatctgcagctatgaagcggttttctatagtgcttttgcaatggtacttatgggatggatatttgtggaatctgccaacttgtattgctcagaacaaaatggttctgcacgccgtagtagcattgtggagggctcaattttcggctatgatgaaagatgcttacaactatctgatctacgaatccctctgttatttgtaagatgacattctctttcccttgttatattgtgggttgctatgatttatgtaaaatactcaatacattctgtatcttaccgcctttgcagacgatcttatttaatgttgcgttctttggaactgggaattttgcgagtattgcaagctttgaaatttcatctgtgtaccggttcattacaatatttagtgtaagtgtttgtgtcttatgatttcctctttctctataatattaggttttcttttctattattctattactgatcgtctttcatcctctttccttggcagccgttcctgatggcagcacttcttatcttcaaattgttcattccatttatgcttgtcatgtaagttttctcagtgtttactatgatattggaccatcctgcggtgcagtggcggaggcaagatttttgtcatgggtgtacaaaaccgattaaatactccataaaaacatgaattttttttagcaaaaaatatgaaaaagtagttctacatgtgatatgatgagctgaaaattgttgtttctagtgaaaagacaggtatttagccaaaattatattatgtatacccaacaaaaatatcatagttttgacttgaagtaaaggaacttgggtgtacatctgtacactcatgaccctatacagcctccggccctgttgcggtgaatggctgataaaataagttgatacgttgaacatattttgtacttctgtacatccgcttcacaaaatataacgttgaatcattttttgttgcaaaataggtgatgttttaagattcaaaaataagaaaagaatacatacttttagcgaaactaaaaaatgtatccacactctacgtttgtttgttttgtgcgcgataagctatctgaagaacaatatttagagtttggagaagattaattgttgtagcgacaacatatatatttgcctttattccttcatcatgcttttgttccgcagttcataatataccgtgtttgattttaccttcgttttgatatcctaatgggatttaatataagatgcgtaatcttcaaattagttattagtggactgtttaagattgttttagagttcctttttattccttactctgaactctgaagcataatagtaaaggaaaacataaacaaagatgagccaccagattagatgcaatttgtgattaagctgattcatatgttgcgacttattgcagatgtacatttagtgccataaccaaggttgtacgtataccacggctgggctgttatttccttgtaatactgctgtctgatgtaatgacgattcatttctttttcctggtatgtgttcttttcccctgtgtactttgaattatcctttatagtactttgtgctgtagctcttgcttgtacagaaaattgtaagccaaatgttcttcattttacccacaggttcgaaatacggggagttggatggaaattggcaatagcatcagccatttcggaatcgtgagtgcccaagtagtttttgtgttgctgcttttcgccctcacaaatatattcacaaaagatattgaggtctcatctcggcaactaagctcaaggaaagttatgtaattgttccatttgtttggagatcgacattatactttcagttttgttagagtttaacttttgggcgtggtttcgatttttctgcccaagttttgtaacttagctagtagatggtgaactttgtattagatggttccagttatcatcttctttacatgtaagagcattaggagcatagaaaattttctcgtcgagaatttagttcaggtttgtcttcatgggctcacggctaccgtagtcgtcaacacgcatttttttcctccgatatatttcacggctcgctcagtttgtaaacatgcagtagtgtagtgttggggaggcgagcagagattggcctcctgcattgattcaagatttccaaatggtaattgctgtaacttgagtgatttctaagcaagattagcactaccggttttgtatgtaaatgttgttgttttgtgatttcttgctctgctatcgctcgacaaataaaatgagtagttactactgatcgcatgtttgtaacttggcgtaatccttcacggcgagctatgcttttgcccccacgagaccacgaccagtggaagcatcactgcctcactggctcactgcatcagttgatcgcctccgtgcggtccgcccgttcgttatccgaatccacccaaacatcccgcgttatccagccacgcccccctcccgccccgccacgtcaccacccaccgccacgtggctcctctccactggctgagcggcgcccacgcgggataaggcatttctccctccccgaaatcctcaccttaataaccaagcatacacacccccgcgccgccaaaagccgccaccacccagctcaccgcatcacacgcagcagcggaagaagcagcagcagcagcagcagcagcaatggcgtcgctcaccatgatggcgtccctctccgccgtggcgccggggcgcgcggcggcggcggcgccgcggcgcggctcgctggcggtggcgagggcggccgccggcagggccgagtgccagcacgaggcgcaccactgcggcgaggggtgcgggtgcaggggcggcgccggcgccgagggccgccgcgccgtgatgttcgcggccgcggccgtcgcgctgtcggcgatcggtgccggcgccagcggcgccagcgccgcgttcgccgagtcggacgtgaagcgcgggacgcccgaggcgaagaagaagtacgcgcagatctgcgtcaccatgcccaccgccaaggtctgccacaactgagctgtggttagagggaagaggggctatggatgcagtaaatacatgtacggttttttaatctcctgtctattaaaaattcgagctctgattagactgtcgccatggatggcatcgaaatcaagttgttgtaatatgatgatcattgcgaattcgaggtgaaaccgtacgttctcttgtttcgttcgttgcgttggcgttgcacatgcattcacgcatgtatcgtaggacatgcattggctgacgcattcacgcataaatcgcagtaaaaacagacattgtttgtcacatttatgccttgaaataagtctattttacctccctcatctcttgccccctgtttgaattgtctccctcaattgcaaaaccggatataacgtttcccccatcttacaaaactagttgaattgtctccctcaattacaaatccggatataacgtttcccccattttacaaaacttgtgtaaattaaccctttaggtaatttggaaagtagtttttctgacgtgtcgaacccacatgtcatagactctcctcttccctctctctctcttcctctctcttctctttttatctctctcgtcggccaccggtggaaggaggacgcgggagctcggggaggccgtggtggtggcatcccagctccgtcctcgttctctgagacgggggactcgacaaggtcgtggcggagcaggagctcgtggaagctgcggtggcaagagaggacgcacgagctcaaggaagggggagcggatcatcgatcgcgaggtcgcggccgccgcagacgaaccccgtgttcgcggcgtcggcgccgctgctcgcgtcgaccacgccgagctcacactaccgtagcgtcgcctcctgtgcgagcggctcgtgcacgtgaagcgtcgcgccgaagcagacggcgccgacgccgtctccgccgccggagtccatgacgaccccgtcgctcttgttcgcgtctcgctcgaccaatgcgacgcacgcgcgctgggctgctcctcgatgcgctccgcctcaatcgaaaggggtcacgaaccttgcgatcctagctgcggccaatcgaaagggtgcgacgagaaatcccggtgactcctctcgcatggtctcgattacgacgaactgcggattattggcgagcaaagaactgaacccatggcaacaaatttggtcaagccaaacgagaaaaatcttttgctgctaatgggcaggggcggatccagaacaagatttaagggggactcatctccttcttccttcttcagtccccctactcttcattttcttcctattttttccctttcatctccacttctatcaatggtgatccagcggggtaggggggactcgagtccccctagcacccacgctgaatcctcccctgctaatgcggtaagattcctttcgagagaatccactcagcaccactgagtttttgttcttggcgagagcgagaagggggaagggacacaaaatattagaatgactgccatgtggagttgttaatttttatttttttctcacggacaggtatgggtcccatgagcaccacttaggataaaaccatttctgaaatcaccgaaagagacgatttacaccagattttaaagatgagaaaatattatatccgattttacagttgagggggccattcaacctgggcaagaagtaagggatgtcaaatagacttatttcttatgcctaacagggcctcaaggagcccatcgatcaagctctaagccttgtttgtattacataacatatatctcttctagattctactcgaaatgaatacgtactccctccgtttctaaaaaacaaacctaatacgagatgtacatctagtactataaatctagatagatttatagtattagaatgtatatcatattttatactagattttcttttatacgacggagagagtacaagttacacacttgaccattgtttggttgaggccttgagagaccatggcaacatttgccaatcttgtggccaccaactttgttgctactccctccacgtacaaatatatatacaacactattgacatggtctttaatatactactttaacaaataatatctataaaataaattattttaagaataaagagttacatatttaatagtaaaaatattcttacgaaattaatctatgtttccttttttttcaccgatagtaaaacttgaaaaatgtttaactctacactgttccaaaagtccttataactagacatagggagggaacgttcgataaaaaacaaatctagggccggatgtgacatattctagtacaatgaatctagacagatgtatatctagattcgtagtactagtatgtgtcacatccagtattatgttgttttttatgggacagagtgagtatgcaatatgcccaattgaacatcgctatcctagtttaggctttaatgagatttattgtagagggctaaatagttccactttctctgtccgaaaagtatgctactagaagggaaatgctacaagatgtacggtatccggttaagactagatgatacctcagaggcatcgcctaatacctgatagatgtcagctgataccccgttcgaacgggatggtacctctgaggtattgtctggtacctaataggtatcggatgatacccaggtatagaagatacctctgaggtatcatcccgtctgaacgtaataccattatgtactagaattgaactcgatcaaacaccaaacaactctcaatgacaaatcatcaatttttcccccaatctatctcactaccttcggagttcagacacataaattttctgaattttcatgtaaatcagttcaatcttcacacaacaaaaaatcatacatttaaaaggatgcatgaccactatactacccgtatcagtatggcatgcacatccaaacaaacgggccctagcatccacatacgttagcctaattaacggcctaacagtacgacacgtttgacctgttgaacgattagtttactacgactgtgtcagctgtgtctcaacaagtagcgtgtatacctaacaagttcacttcacgtacggcgccgaacattcttccagctacatatattcaaagttgcagcgttgctttgcaggccagggcaggatttagaattaattaggcaatgcaaagttcttagaaaaaagtacgcattcagctggagccgatcgatgaaacgatccatcgatgggattccaacaaagcatatgcacgccggacaaatttgtactgaccttcctatacgggacattgtgtacatgtgttattccaagagtattctcgagcactcttgagtctaatacttgccattttgttttctctgaatacctttacgtctgatgactgacggccagctgcatatatgtacctatacagcatgcacatatcttagttcttcgatctgcaccctctgttctgtttacacacaggaaaaacgctagctacgcaacaattgcaaatatcttggttctttttccaaagactcgcacgagacggtgcgaagttttattgatagagcaggaaaaaattacaagattacaaccctagagggtcgtaaccaggcgaaaggaaaaaaataccaccacccacataccgacatcgccaacacacaagcccaggagaaggttagcaccggaccgaccgccgctaagcgtgaccgacctccactaaaccaacaaagggacacagatgagatcgtcccctaggggatgccaaaacaacgtcttcaagaacagaagcgacggaaaaaccgccgccgccgtccgtcgggactcaaaggagccaagactgggctttcgcccggcaatcacccttgaggggtgagacagcaacaacgccctcaggaggggaaatgaaccatcattgtcggtccggccaaggccggactgggttttcacccgccgctcaccacctgcgaatgcacggctgacgcaccgatgctccaccaccacacaagctctgccaacatgtgggacccctgcaccggcatcccctgccggccagccttcgtgtgtccaagaccgcgccacccactggcagctcctcctcacacctaggtcgcctcctccactgccggccgtgcctctcgcgccaagccagcctccatctccgccgcccgcgcctctcgcatcgagccggcctccgttgccatcggctgcgcctctctgtgccaagccgatctccgacttgattgacaaagcaagagtggtgaccttgcagattgcacggctagcacattacaaaatttctcatacataatagatatacttacacattttattgtgaaaggaaaatactaaaagatgacaatataactttaaactctggtccaacttgatcatatatatattttatgcctgatgttccaattaacatgtaatttatttattccctatgtttatttattcatgtttaacatgcattattcattaatatatttaatctatattcagattataacattcaacaaattttatgaaatttgcatggcaattcaattgctaattttcatattaaagattcagctatattctccattgaatggtatcggtatggactcttttgttcaaatttgtaatgtttgcaatttttttataccaattcttagtgttttagacattttctatgaacttctcagtggaatcaattaatgttttattttttcaatttatagttaaaataactctaatatttttacatggactatacttttggtattttaattgtaacttcagatatttatataaaaactgtcaatgcaaaatttacattttctttcatatttatttatttatttatctatttattttgtttctaatgttggtgattttaatttggaattcatattgaaataaaattgatggctttattttttaattttgaattgcaattagtaccatattgtgttgtacattgacttttcttttttcttttaatttaactttatttgattatcatatattttaaattgtatttctttatgaactctttgctttaatctatactgccataatttagacccacaatttaatcatcggcttaatattcttcctttacctcaaatgctgttgtgtttttatgctgaattgtttaataccaacataaccacactatcttatcacaaatctgaaatctccagctccaatgcatctcgagatgacctgttgacacatgattaatttggaagcttcacgatcaggttggtgagatatataacacactatccaaagttcccctgttgcgtttcaagccggtcgatatgatgcagcgcaaacgacgacagagacgcacctaattaagccaaagccccaaaaatcaagataacgcctttagattgctttatgcgatgccatacggatcgatgcatgcacaaaacagcagctaagcatactgtttgccagtacacacatgtagctttatagtacttgtgtagctatacttaatttggagagatgggatctgccttgatctagcatatgcttagagcttaaggatatgaacattatgtatatatacatgtatccatacaggcgtacatggtatagatgcatgtaaagtagtaaaactgtatctagctggttaattaagctgtcactgaattttacatatgtccttggcaagctctagctgacagatggaggaaaagcatacaggtatatatgcacgcagcatcagagcaaattaaaagggggattatatatttgatgatcgacggtgtgatctgatctgatgagatgtacgttcctcgttctttccagtggctgagatgcgttccccagaaagactatcactagaaaattagtttaaagataagactacattaattattgctccttatattccttaatagtttgctcattatttgtatattaatgcttcttcttcttcctggtggcttcgtggctcaagggaagggtggcgggagagtatttcttttcggcctactcagctgctgcctgcagcacacagatcgatcgccggtttgccagctactttggaggcagaaaaaaaatgcattaatcattatgtacgcgtacagagcctgatactggaaaaggaggctgatcacccttgatcagtactgatcaccgctgaacaaactaatcaatctagcttctgttccgcttaaatgccttaatcagtacttatatataagtagagtgattttaggtgtataatttgatatctctttataccattcggtactaatagataccaaaattcgtattaaaaattttgagaaattttactatcattgggaggtaataagaggccggtactaatttttttttatactaacattggtaccttttaaaattagaggtagcgagaggtatcaaattttacactaaaatgttgtaccttccagtcgaggtattgtaataaatcacttaaaaaatttagtacctcttagtattaaaaattataaaatttctcatataaattaattccatggctgatctaatctagacatatgacagtataatagtatatactcccttcgtacatcccgaaaaaagccaatattgtatgtccagattcgttgtattacgatgtgtcacatcctagtacgagattatatgtctgccctaaattaataagggatagattacgtgtacccgtctgttaatgttataaataagtcatacccaataatcttgggttagtctctgcgggacccaccatatacccagttctatacggaatcatacattatatacggaagatattttggataaggaaggggaagtaaagttctactcgggcactataaggactactcggatcatattcatactttgtctctctagttctatttggacaagggggcacctgagggtataaatacatgaccccctagaaggagatgagagatggcaagccagaagatagatctagaacaaatctacacaagccaatacagatttagagaatccaagacaagccaacatatatacaccagaacaagcctagacaaatccaatctgaagctacaaaggcaaacatgagggatctagagctacctccaatctcaccgagttcacattcgaagaaaaagactacactagctgttggctgcatgtaagggtgcaatgccgctatgctaacaaggattggattaagtcatccaattattgtactaatgagatattgatatataaaggtaactctggatttggctaatatgagtagggctattacttgtcagttaagggggccgaaactatatataaattcttgcctattgtctcttttaccctaatatcgcgtacaccctgataccgacgaacaccataccctacaaataccgtagtcacgatatagcctatcgacatcgtcaaaattgttacttccttcatcttaaaatataaacttttagttatctaaacaactatatatctaaatttataactaaaagttgcttataatattataggacggcagtaatactaccaacaaaagcacccatgcgctagtctatgactagggatcatcggttggcctaataagccaaagccaaatttaaattttttatcttaattttgaagctaattttaagatatttttaattttttatattggtatttaaattttatatataaattaatttttattttttaataaaccgttttgatttattagaaaatgtggacaaccggccgtagaaccccgtggtatgtcgcttcgtccagaactatccagacctcccatatgcatgatcatggagctagttaaacgcatacacagaatacaaaaagaagcgacacacactacgtacataattaaattggatttacgaatccaccaggggccgcaaaacggaaggttcgaagctaggcagcgcgcctaactatttatggttgcaatttgcaacatagtttatccttaactttaatcctacattgtaaaagagctgtcctacgtgcatggtggcatctataaaatgttcgacattttgtgtaaagaaattgagaagtggaagtggcgatcgaatttggataccccactttgatctcttctcatatcattggacaacggtatgtacgtacaccgatcatatcgaaccactgcacaaaacagaatggaagctcgatcgaggctgcagtgctccccaaaatactcgacaacttgggccaccagtaaattatcacatgcttaatttaagaataatatatattggttatgtccctaaaaagacttgacttacaccattaattggttgatactccctccattctaaattgatctacatatagttttttttaggttatttctaaatgatctactgtacatatttgtgttcatttattaaatatattcgttatttgtgcattggagtaaatggacattgatgcatgcatccatgcacacaagtatttataatccacatgcaatatcttgatttgctattggctaggaaatagtggggatgttgcatgcatcgagtttgttgctagggtaaatatagtattagagagttattagtttttcttggtcttggtgtaccttacaaaatatgtaaatcaatttagaaaattatgtagatcaatttagaatggaggaagtaaattacaagcgaggagaaaaaaatgcatgcatgggtgctccttgttaataagaaagtagtgttatcaagtgattacaaggtatgtgaggggtgttgaaagaataaaacttcttgctttatgactcgagagtaggtaaaaggacaagtgataacaaggtatgtgaggggtgttgaaaggataaaacttcttgctctatgactcgagagtaggtaaaaggacaaaatgaactatttttgacaaattttaaacgtaagaaaatttgaggatattcataatttattggtcttgaaaaaagaatctaacctattcttgtttaaatgtaaaatatttaggcaaattttgctatgcggttcaaagtttgggtaatttgctgatggatatcgaaaaacgtgtcacggttggagaacacccaaaaactggtaatttgctaaagaattaatatttttgtcaaattggagagagaaattcttttagaaaaagagagaatgcccctggggccataagtttcgaacctaactgagatgcagctctcaatttgccttcaccccaactacatattgctaatatatatcatattttatttttattccagcgtcaggttagaaacttgtacctctagagatactttttttaaaagaatttctctcttcaattggaccgaaacttttctctaacaagttattagttttctgggttctctagccgtgacatgtttttgcggtatccaacaacaaattacacaaaaatttgtatgtcatgtattacaatttgctaaatatttatgactggagcaacttatgtaaaatggtactactcgagactgtaggattgttcaaggaaggctaaacgagaccaacttgcagtaacccttaaatcaagtgcttccttagcagctgcatgcctgcatgtaaggtacagattcaaagggtaacctaattaagttaactaaagcagattgttaaattgaattttgaccccctttgccttttcaaaggaagagcattccacttttgtgttaattaggagagagcatgcacgcagctagcacgcagctgcaagctaaactatagtacaactttttacactgcatgttatgtacctaattaaactgcaaattaagcttatttcatgctatgtttaactgcaagttgcgaaatgcaaacaaagccagcccagtacacggtaccacacacagcttaattagcaacgcacatgagatgatgagatattcttttcttggatatttttcatatgccctttctgcatagtgctctccaaagctctctttgagagtgagagagatagtgatgtatatatgctgccaatgatcatcatcgatcatcgattcatcctgcaattcaattaagcatcagttgaatcaagctgtgcagcagcaaggacggcccagagagagatagccagtgagagagagagagagagagagagagagagatcagttcatccatgcatgctttgcctagcttttttccaagttcttttttctccttggtctctagcttagctatagcctagcttagcgaaaactaaagcagaggactggaaaccgcgctgccctgcccttttccgccatagctaatctagctatcgccggtttcgtcatcaataatcttctctgcctcttcctctctaatccaatagagagaattaaacatacatgcattcgctttagcatcttgccccttttcttaattggcatcgtttttcgcgcgctcgcgatcgatctggtccgtccaatacctgcctcctccctaccccgatccccctgccgcgtatacgtacgcgtgctccttaattttttttagagccctagcttaattaatcagcttagctagcttgcatccaccatagtacatgtacagttccatccatcagcctctataaattgggggtttgtgctccaagccgagcacctcagcctcagctcaccttgtgattagcatagccactgcagatatcgaatattgcattaagctagctagcttaattggcatcataagcagcagaagaagaagagaagagaagagaggaagctagaagatataggagaggaagaggggatgggagggaagtcgtcgttcctgtgcccgatcttcagcttcctgtcgtgcaagtcgaggaggtacgaggacgacgacgacgacggcgagctgagcggcgagtggccggcgaggtacgggagcaaggtgaggtcgagcgacgaggactacggcgcgtggtgggtcggcgagcgcgacgtcgaccgcaaggcctccgactacatcaacagcttccaccagaggaagcaggtcgccgccgcctagctagctcgatctacacatctcgatctccaaccacacccacagctcaacgataccaatctttcattggatcgagggggactagcgtacgcgcgacggcgacggcggacgacggccgccggcgcggccatatatatgtactgcatctgttgtctcaaccggccatttgtgtaccgcaccgcatgtacgtacgtaggtctccgtttacataattaaattcttctcatatatgtatatgttaaattgttatgtatgtttgttgtggattattatgttatatatgtttatttagaccacgaataattgtaatgccggttcacagatcgagatcttgccatgtgtatatgtatgtggagcatgtgaactcttttaatcctactgtcctatggtactttgcatatcgtttaaatagttatatttttttaacaaaataataagataagtagtatgtgatacatctcactatatatataaaatatagggttaaattaatttgacttatataagttgaaaaatcaaatatgactatgagcatatgtatactagattgacttaaatttattatttttgtcacatgtgagcatatgtacaacttatatagagattgaattttaacatgcatataatttcgccttttattaattcgttgcaattttcagaaaggagctagctatgatatacctccaacttttttaataatagaatagaaatctcaaacgactctacatcatatatatgacacacagccgacttcggccccgtatacctaaaattaagaaacacaaacaagaatgtggaaattaattaagcagcaacacatattaattatatataagtaattctcaaaaatatatatataaagataataaacatattttagcatcacacttttgcatgcatggaccatctttaatggaaaatatttatgaatttgatgtttctagatcatatcggagtgtatgtcatgcagactagaaatacctgttttaattttccatgttttttttttacgatggacctgctgccttctgatctcccttatatatttactgctccctccgttccaaaatataagcatttttaacatagtaacaagttaaacatttttaactttgactattaatagaaaaaaataaaaaacatcaatcatgtaaaattgatgttactagatttatcattgaacaactattaaaatatgtaactatttttatttaaaacatcttactttgatagatattgttggtcaaaatagcatttcgaagaccgtatcagagtaaaaaatgcttatatttttagatgaagggaatatgtgtttttgtccgctctgtgttattgtactgactgatactactaatcattagttcgatcatattgttaaaagggagtcaatatataccaccaatacttcagtcactcatgtcagtccgatccgatcgacttgaatagtgtctttttcgagatatacgtagctttaacatagctatatatcttcttttctaaccatccatatatatcagtgatgctaaatagccgaatccctcaaaaaagcctcaaccagaagacactctttaatttgtactcccctttgactccaaatactatatatgaatatatcattttagagctgtacatagaaaataagagaactgttaaaatgatcttgttgtcatatacagttatcgtatacttgaaaggatacttcatttatatatttctaatttctatactactaaaaaataatagtgatgatggtgattcgccaacaccactactacttttgcaattttacaagaaaaaaaatcacctatgacatattattatatattttatttaattaccaatagtaaagcatgggcattttgctagatttttaaaacactccattgatatatgagagtggtacgtagcatttaattaacaagagtatgaaagaatattatactaccttcgtactcacaaggatgttttgaacatttgacacaatctcgaatttacgtggttaattactttctcaaactatatgtctataagaaaactaaaaataaaactacatgacacaatctttcatgacaaatatgttgaaaatctaatcataattcagtatattttaattcagaaaattattatactaaacatgacataaaagtaatagatgattcaatgatagtgctaataatattaatatcatcatagtaacatgtttaacactaaaataaaaagggtgcgtaatgtacagaagaataatctgaatccagagacggtggtgttggtgtagtcgccccagtggtcattgccgccattgtctctgtttccggtactaatcaacatggtccggaggttgatgcagaggaagtagagatggctcggtgtagatgaagtagcgtcagtttgacgcagagcagtcgcatgaaggatgcgctccccaaaaatttaatcaccacctgcccttgcaggtactctggtggatggagttaagacctgctcgtccgaatacttgtgtgcgcaagtgctcaggatcggggagaacctaagtgcagcttagaaccatatgaatggaggtgtctaacggaggagagccaaaatcaagggagatagaatccacgcctcgcccggctcggtgcgcgttcccaccaccattttaaccgctcaacagacgctctcaattagcatcatacttttaatttgatacactactaattagaaaggtctagaaaattctgaaagacattttaagctgcaaatagcctttgcaaagctagccgcaaatgcatggggagcgtctcctccggttgattccgcggcatcgtcacgcgcagacacgtacggcaaagcgggagcgaacctgccagaaagctctgtagctatgcatgaagagaccaaagcggtgggtagtttccatgcatcgctttggtgagcaacggcctgcacatagcgcccagaaggaagctaggctagcctcaaaagccgcgatgctatcactttctgcctcgggcgattcattaattaattgctctccccgtttgaaaatatacctcggtgacatttcctaaaatttatattcgttgtacatgaaaatatcttagtttttttttattttttttaatgagagaagtaagtagtactgtacccatctcaatataaatgtaatctaatatgacccagttcttttctccaacaagagttgaatgaagattaaaattttggtggcacgtttttcaaactgctaaacggtccgtttcgtatgaaaactttctatataaaagttgctctaaaatatcatattaatctatttttaaaatttgtaataattaaaactcaatcaatcatacgttaataccacctcgttttgcgtaaaaaaacttaatcttcatcttcatctccatcttctggagattcaaacaccacctatatatgtgatatatctcaacatagggttgttcatcgacggtttttagcggtttggtcagaaaaggcaaaccaacccagaaatactagtaccggtttatacggtttgttttgaacggttttgacaggttaaaccgggattaagcagaagaacagcaacacaaccatggatgtccttccaagctcaacagcgggcgattgcaccatggctcttagcctttccatgcgatggaggcaggcaggcaggaagccagcggcggcggcgagctagcgattgtttcctccttggatgggagccgccgtttggctgcctcggcatcctcgccggcatcggcgccgccggcaccaacgtctacggggttgttcacttacgtgcgtgctaaatagccgatgcttgcttggtttcctcgatcacgcagatgccttcgccatggcgtcttgctgccgcggaagctatcaggtaatggcagcgcaggtcctgaaggacgagacatggccgggttcaatgggttaagctggtcccaaaccagcccgtgaataaatggaaaaacggtttgggttggtttggtttcacgggttgaacggtttgagcccaaaccgtgaacaggctgatctgaacacatatcgcacgttcttttctcctgaagatgaagatgaaatgaaaatgaggatttaagttttttacgcaaaacgatgtggtattaacgtatgattgattgagttttaattttcacaaacttgaaaaatagattaatatgatattatagagcaactttcatatagaaagtttttttacacgaaacacaccatttagtagtttgaaaagcgtgtaatcttcatctaactttggttggagataaagaaaggaccatatactgcacacggacgtacacagtccaaaatcttgctgagaatgctgctcctctcctgtacacttgtcatgtcgtaggtgtaggggaagaaataccgggtgaatatggcccagctgcccgcggtgccgtggtggggggcatgtgggcgagacggtgtgtggcccggtggtggtgggcgcgcggtgcgtgaccggccggccatcagcggagctaggctggcaggctgcctgcctgtgcctctggctcgcttgctttccatcgccgcgcgcgtgagctagcggcgtgtcgatcgatcgatcgtccatgggaagattgaatttgcgctgctccctagctacccttccgacgtcacggtcgtggattccctctccgagaccatatttctcgggggaatcttggcctcttggggttaggagtagtcccctactccgagcaaatatcggccagctttgctttcgcgatttgggtgaaaggagagagagggagagatgcagcggcgcgcacacaggttcatcgattctccatctgcttttctgcacaagcttacaacgttagcgcctcccttcggaggtaggcccgtccggaaatcgcgagacgtttttttcagcttagttatcgaattatgaactattattgttaccacggttctcaaactacaatttctctgtcaaaattttctgcaacagcgttgcttatataacctgttctaaactacccctattattctaaactagaaatgtagctcacacattctcacggacaccttattgaaattgtcataattttttgctattggcattttgaccattatgatattgtattattttgaatatttttttgataattttaatatttgtattaaaattattttgaataatttggataatatttgaatattatatatttttaataatattgtaaacgtgcgcacagtcatctttatgaacgcacaacatgcacattgtaccctcttaataatctgttagacatttttctagacaaacgaagtctactttctttttagagatgacgaagaagatagtagataattaaaggatgctacctccattctaaaataagttaatctagaagagaataatgtgacacatactactgctatgaagaagctatgtggctgcttgaaatccttttggagaagattaatggacttttagtatatacgtgacagtttgggagtgttttgagaaagccacgtgataacataagagcgttttgaggaagtttaaagtacttttagtatataaaatagatattgacgatatttctcttagttcatatcgacttctctctaagttaataatatttgtcgttttatataaggacagtctccaagaaacaacaaatggtcactattttataatatatatatataaatatcaataatttattgaagtatttttttaagacttatctataaatatggtttccatatttctaagataaatattttagatgttataaagatcttaaaatttgacaatagtcttattcaaatcagagtattatcgaccagagggagtagctcgtgtgctttactatacaaatccatgtggcttcattcttcacataagactggttacaatatggaacctgggaagtgaaataattatcgcttcacacttcacgattcgcagttcatctcgcaagatgcaaactgcacctcccagcatacaaagtgatcgtgggcagctgtaatgtagtttaatactgatagaacgatagtaatagtacacaatttcatataatggtcatatggtatacgtatcttacacaaatgaccaagaaagggttttagtatatgtagactgcatttctggaattatatactacattttcgctactggtacacctttcggtacatttcaatctctacaagaactgagaagtcaaagaatatcttctgtgatgatcagccagagggaaggttcggagtgcgacctctcgtgcatacaatgcatcaacacacaaatatcctaccgggacagaggaaatgattgctcggctctgtagcgaattcgcatgaacaataatactcatatccaaacaatctgcacatgttccctcatccaggaaaagaattcatcataagctgagatattggcgttcctagcatcatgagaagatagaaaccagatggttcagcaatcaatcttcatgctcgtcttcaccttcagagtctgcacataaagcagaacagttttagatggtagcaaactcaaaataattttcaactcacaatggtggttggagtaatgcatgttataagcagactttgtcttgtcccaatgcagatgggactgaaaataagaccatgcaattttgcatgctcatcctgtgcaaaaacaagattctaagggggcagagcttaccagatcgaacatcatctccaacatttcttgtcttgatttgtctcacaagcatccgatatatcagaacccaccaatatatgtgaagaacaagtagtgaaaataggagagaattgaacacatagtaatatataggaccatcaaaattgtgcttcttcttgtccaaggtcaacaagacttcatagctgaagcaatcgggacttagtcagctcatgtaacttctaataaataaggaatgaaaacaccattttgttacatgctgggacaatgggacagcaagatactattgtacatagtattctagtctgctatcacacatatattttgtacaatataagtatgattatcatggcatagaaaggatcggaaataaaatccaaaattaatttcagcatgcggtggcatgatctagataagtttgttttcaagaggcataagatactgtgctatgttcaaaggtctttttcctactggatacaattactgttttctaactgaattacttgttggcttgggtttcttttctccccttaaaatgaaggcattggcaagaacagcagaattcaccatccaaagttcatatggtacaaatttcgcatagtaaataatatgcttgcttttgacaattcacaacatctatagtacttaaaatgttagaagtggtggtgtccatccccacaccacccctaccactaacatctgaaccccacaactattacaccacctttcaacaagtcatcccccatttcactattggctcccctaaatttcaaaatcacttgttcaataagaaaaatcatagtattacttagaacaaataagtgcttattgattgatttaataagctaaaaactcaatttgttttccattgcaatgcacgggttctaggctagttttcaaaaaaacttctttctcacaaaattctggctgacttttctaggcatatctcaacaaggtcagtacatcacatttaccttgtacttctgagaatccagaacggaaaatatgtgagacggagaagaacccatgaaacgacgaaaagaagaaatgcaacattggcaagcaaatcacaatggctatatttggccattttccctacttccaggaacacatcacttgcatcatgaattgccaatactactgagccaactctagcaaacctggttcatgaagaaaaatttcagaaataaattagttaagtgttaataaaaatgagtgaaataaactcagtgaagataaaatattaaggccctgtgctactaactcatagagtaatgcttgaatcaaggtaaaaaaagttcatattcaagaaacaacaaaaattaaaagttagacaaaaagagacctgaacacataagataaaactatcagcgcaacagttgcaacatgatgtgacattgacacgccaaaatctgaacgccttgtttcccaaaacataagtgcaaatatggaatatgtgtagaatccagcagcatacatatagacagccttaagtttccatctgtagataaggggaaaattgttagatatacaccagcctgagaactagtaagaacatgaagcaataaaggaccaattcgtattactttatcttttggtcaggccaaacctggtcaccaggtccaacccagaaatatttagtgtttgtgaaccaaggctcattatatgtaactgacaaagataaaatctctccagataggaaatagacacatttccaagctgattccttaaattttcttatcttctttcttgtttcctccttctcataatcaaccttttcctttccaaatataagttttcttccaatccactgaaacgaaaataaaagaaaaacaatgaaagtgtcaacattaagctttagaattacattaacaattgaaaatgttaattatttaaagtaaaaatatctatgatacaacgtggagcctgagagaatctattagaactatacaggaacaagagtaattttctggtgggttcggaatacagaattaaagtagctgttgtgctcaacctttcaccaatcatgtatttaagaagcataaattactttagaatcataataaccctcatagtgaagcaaatgatctcatctagcaaacaaaaaaaatgtctcaaacaaatacagaacaaatggtaaccagatggccatgtgccataattgcagtaccctgtgatgtctgtatattgtagtcatgcatctgtctaaataattttcttgtgaaaaaagctatatgtaatcaacttaggtatcgcactccaacctagactttgagttagtaaatgttcataaagaaggcatcattgtgtgcttgtgcttaagtccatccatattagaagtgaaagaactctccctcactagtgtcttagttctccgtcctgatgacttgtaatgatcagaattaccttttaaataacataatggtatgtaacataaagatgaatagcatgctaacatatacctcaacatacatatcaagattatctaaaaaaaatctcaagaaaacatcacgacacaaatgttttcctggttacagatagcccagtggaaaggtatactactcatacaataaatgtggcggttgcaactattcttactgcaatgagatggttgcaatttgcaaatttataaccgcgaggtatttctagtttttgagggatataaattacattaaccttgctcaagatgctcacacgagagaaatactgctctctttatgccagaaaccactcagatctactcgtggtctgttgctgcactgagctgctgacaacctcaaattcgcagcacatcgctgccttatgccactgataaacagtaaattgtatagtcgtgtgataggttatgagagatatcaactcaacttgcaatccatttctctgctcgcaaaacccttctccttgcatgaacttttaccttaataaacttgtgttcaggctggcccagtaagtccgtcattgttcgcctcgaaaaatacattatatatgtattttcttaatggaagacaaactaacccagggaatcatatatggatcttgatagctaaatcactaaattcttattgtttaagatgttgaaactgtataccattattgttatagttgatgcgcctatgcctcagagatcacactattcatcaccaaagaacaaaccttaaatcttaaaccattatactccctgactaaccactgcagcgcaacacaacaggggcccctccgtaacaaaaaatcagattcagagtaccagataatcattagacaagagaagaggacgactctccaatacagcaatgccatgatgtaccagcacatctctcctgagaatccgagcgtttgatctctccccccacaattccaggaaacgcgaaacgcatgccaagctagcccgacaagcaatcattaaaacgctaaaaagctagcagcgcctttgtttccccccacacacataaactaaacccagctagctagctatccaacgcgatcggattggttggtgattcctccaacgcgaaatccagcccggagaagaagaagggaaaacacacacacaccagcaaaacaaaagcttcgctgctttccgcacccaacaggtcaacagtaacagattcacctcgaagacgaagcagtcgaggaggtagcggacgacgaggaagaagacggcgaacaaggggagcgcgaagaagtcgcggtacgccgggtaggcctcccgctcccagtccaccgccgccaggagccggcccgccgccgccgcgacccccatccgccgccggaggccgaatcgagtaggagcaagaaatcgatctctcctccgccgcgccggccgcgaagctggatgaagaaggatcgagaggggaggggaggcgaccccggttggggccggggtggattccgattggacttccctcctctgttcctcttcgccctctgactcagccgacgcctctgttttaccactacgagtctactactactccccacttgtttatttttattttatatttttcctttttttattattagtctcgcagtggttgcacggagtggtacaatagaaagcgcgtaatgaaccgtgttttataaggggtgtctagatagggctaaaactttttagcccatgttacatcggatgtttggacgctaatttggagtattaaatatagactaataaaaaaactaatttcataaatgagagctaatccgcgagacgaattttttaagcctaattaatctataattataaaaagtttactgtagcatcacattgtcaaaatcatgacataattagactcaaaagattcgtctcgtgaattagtccaaggatatggaatatgttttataattaatgtatgtttaatactccaaattagtattcaaacatctggtgtgacatggacttggaataagtccgtggaaaccaaacaggcccctaatcccaggaagctgggaattgtattgcatctaccgttgaaaagaagagatgggaattgtagccaggttgacttttcaaccatttttgacattttttttttgacttggtgtactatgattaataatccgaaaatggttatgataacttgtttagcgagttttgtgggttttttatcctatgggtaggattcatcgagattcaaaaataattgtatatttcttgtgtgtttgtaaataatcaataggtgaattatttgtaacttattcatacagctgaatataaatgttatcatacaaaggaaatgcatttggagaaaaaataagatcagaaaaatattagaccacaaggcaatgtcggtgttttttttttggtgtaaccttaacatgtatcccataaataattgatcattgttaaagcaattctcacaattctatagataggatttggtcacaagatagacccacatgagataaaaaaatgctttggctctgattaatgaggtgaatgcgagaggaaaataatgatttctttttcttgtggtagaccttaagcataagcataaggtataccataaggtaatactactttccacaatgtatatgactcactttataacttcaatcgttattttaaggttatcttttcatacattgtggttgtcctaagggtttataattattgttccttaacagcactgatacatcttttgttagagatattcttaaaagattcattttaaaagtattcctacaaagttagtttaacttctaaatcatgaatattgcacatctaggaattgtgagtgtattaatctactatataacaagatttagatcatagtgcccataagcatgactatgtgtagagtattggttaatacattcacccgaagttatacttctattgtaaaaaaaattaaagtactcaagtacaaaagtcaataagtgcatcacatatgaggattacgatgtaaatagaacattgcaaaagaacaatacatgatgtgtgagaatatatagtcgttttcccccttaagtatgttattttaagtttctaaaataaagtatttaaagatataacttgtacagtaaagtttccccttatgctatagtaattttttttcttatgttttgtaggcataggaactgttcgagtgttgaactattgtctttatactcaattctaagtagtagagagtcatatcaatccaaaataataaaggtctcgactaaagacgcacaagaataaaagagttaaaccttagcacatcttgatattgtcccttttagttagaggcttagagctatatcgtcaacatgatcaccatttgtttatggtcttagcaatgttgaagatggaggagcttgagttgtatggagtggttgctccttctactatgatgtgacaaggctaccgacatcaagttagatcaaccctaataacccatggataatatagatcaacctagaaagcgatgtttatctatggattagttttggttccactaaaaagttaagtttagttttggttccactcaaaagtttaagttcagtatgaaacctaccaggcatggatgcaagtaaatcaaaccataaattcacttaatagattaatcaagtggattgaccctgtaaattacccatctatttagtccaagttgatggatcaacccatctctaaccctattataaccagaattaaatttgaaaatacattgttcgttcaattttttctcaggaatattcgggatacaaatttttttgcagaaatataccgtcggtttcgcacaaccgttgcgtgaaaatgacgtggaatgacgtcgcggacggtattgcgcaaagaaaatgtgagaccgtgcggtctcgcgtagcgacgcgacgcgagaccgcgcggtctcgcggattataagtgcgacactgttcggtctcgctcaagcaaggagcgataccggtgccattatgatttaattagcgattaattatcctaattagtgattaattaattattaattaattgctaactaggataattaatcactaattattactagttgattgttaattgattaattaattactaatcaaatggagatattggacaatttcgctgtttgatttcacgagagcgtttggtctcgctctttcattccgcgagaccgcgcggtctcgcgttatctcgtactttcatcgtgcgataccgtccacgacgtcaccatgttattttcgcgtaacggttgtacgatatcgataatatatttctgcaaaaaaaattgtataacgaatatttctgaggaaaaattgaatgaacattatatttggcatggacgatttgagatattttgattgggccgatctctagcccatatatacgtgtaggccggaaatctgaaaattctgtccacgtgggcccagaaaccttatcccctcacattaaaaattgcttaaaaatttcgaacactacacctgccgtctcctcctattcactccacccacctcgccggaatgctcgccgtcgtcttctcctccggtcaccgcctcctccccctccccgtcctccccggcacattcaccacccctcctcctcctcctcctcctcctctcctatcccctcgccgtcctctgctcgcccctcgccggcgccgctgcctatgcggcggcggcggtggcggcctcctcctccttcgcgccgtcgccgcgaggcgcgcgggcatcgtgatcgacgtcgacgaggtgggcgaggtcggcgaccgcgacctccccgtggacgtgtcgttcacccggaggctgccgccggtgctcaccctcggggacggcctcgccgcgctgcggcgggccggggaggaggtgaaggcctgcccgcctgccgccgccgcgagcggcgtcatccggttcgaggtgagccgcccagcgaggctgtgtgggaggggatatgtcgtgttttacagatttgcagttggtttcgttgtgagcagccgctgcaatatttgctgcgcggcggcgaggcgacatgctcccccccctcccttacgaattttaatccagcactgtgaaattattgaataatccactcagctccttgacgcaataggcgtaaatcgagctcgcgtctagctcattgtttatgctttgcgatgcatttggatttgtttatcccttacggtctaagcaacaagtgaaacaatgatgattaattctcagttctgacaatgcaacggtgcaggtgcttgttccacccagtacgaaggcgctcaaatggctgtgcacacagtttaagagatcatcattgtttcctcagttttatttgtcgaggaagcaaaccactgattcatcaattcagcttgaaatctctggcgctggctctgcaatttgctttcatggttcctctcgagtagataatgggtttgatttgatatcaaggtgcctcctctctattgctttccgtagcgtacgtgtgatgcagggtgtttctaactaaattaggacctgtttgtccctgcagatatctttcgtttaattcacacttgattagagcctatggatcagtaggtgttaaatatgacaaggaactattgtctttagaggagagaattggttcattttacttctttattcctcaggtaacaactttcagtattctgtggtgctactctagctacctgaatatttatcaagttggtgcgagatacagactatgtgtacaagccattttgaatttagcaaggaaaatcctcgaagttctgtgatatgacattccctgtataaatttggttacatggtttaatatcatattgtcagacaacagaaacagttttacacctgaatttttcttgttagcctttttatgattgtggtggggtcctcaaagtaatccgttggtgcaaagaaagtcctattctgaacatgcatgagtggcacaagtactgcacttatatctagaaaaatgacatagaagttagcctattagaacatttttttaatgtattaaaaagatctacataaacaatttacaagaggatcacaacgctttatgacctactttgactggtaagttattgcacagaaagtaatgcaaatgcaaagggttaaaagtggaggtcaacttggttgaggatttttcttgcattcttgcatacaagtcacataggaggcagtaagaatttacagaattctttcttggttatcttctgcaggcataatgtagatatttgatcttatagcattcgtgatgatcagcaaaattgaatttacaggttgagctgagtgaatttgatggctattccatgttatcgtcaactattgtttgggatgactccgtgtctcacacatttgaggattctgtttgtttatttgaatcttgtttcagtcaggtatgtggaactaactagattaagaaaaaaatatatttaattctgtttaactttctttcatattaatatagcatttccatgttcttttaaaacaattaattttctgttttgtattttcccctgtaagatatggagtagctatgattcttcagctactatctgttatgaaaacatggtaacaagttacattggagaatcgcgtatgtcagagagcaggaatactcagttggtacatatttctatcaatcttaatcactttgttaatttcatgaatttacgcttgtgccatttgttctccactctgcaaagtccatctgtgatgaagcttcagttgtatcaggccttcacatgaacactcatattcactattccgatgttcttacttctatgccttaattagttcacagggttttgagtctgaaacattatttagttatattacggaggattataatagcagagttttgtgatgtgctctactgaagtttgcaacaattgcttctccaatctctaatggccattcttcccaccattttgtttttggttgaatgataaaaaaaatcctctttttcaacaaaaatagataaatgaaacgtctatgccttttaacatatagaacatgctggcttccaaaaaaattagctatggctaatgatatagattgggtgctcatattgtattccatacagagttttggctattcatcgttaaccagtttgtgagttatggaacatagttctagtttgcacgcaaacactctttatagctgtttatgtatttcgacagttatctgctattcctattatcatcagacatcaaagtgctcaatttgattttgttgaatccactgttccaggtatacttggatgctgaatttctcgctgtaatagatggcaaagctgtcacggaaaaggtatcctcttaaccctggtaagcttctttaagctatttcattactttgcaattgagattaatccctggttttaatataagaaatgccccttgcaaaaaggaatattatgtttctttctttgcggtttatggatattttgtctgtatcttgctggaaggcacattcacacctatcacatttataatagtaattcaagattattttttttacgtccctgctgccctgcattacctggtaactaacaagtttgcctacctgttagttagttgaattgcttttgaccaactccacaaattcatggaccaaaaagttaaagtcaagaagttcatgggtacacatagacctcgccacaattattaggacagacataattttcctattatttcctttttaaactttttgttgttcatgttctcttataagactagacacaataaacttgaatttatatccctgatcggatatggaacttattcttttgtctgtaggagaattgcccaacttctgatcagtcatttgttcggttttcgccgcagttcttgttttgtgcaaacatggtaatggtttctacctgagtttctttttttcataaataaccattaaattattttgttaaatacttcctccgtttcacaatataagtcattctagcatttcccacgtttatattgatgttaatgaatctggacatatgcctatctagattcattaacatcaatatgaatgtgggaaatgctagaatgacttacattgtgaaacggagggagtacaagctttctgtagtaagccttttcctacagcattttctactttccaatttaaaaaaaatgatgcatataattagaatatgatataattggtgggttagcttaaaaacagatagtatgtaatttgctctctgtaattgaagttgtacttatctaatttttttataggatttatgtttgcaaagcaacaaaattgaatctttcattaggagatgctctaacattaatttggcatgggcatccttcatagttgaagaatttgtcaggcttggttttacggtaagcttaactgaatacatagctctagcgtttttaccatgcctctgacctggtttgctttagtacttctgtatagctccagggtcgagatcatccccacttgcactttctgcttcagtccatcctttgacaacctgcatatcatgttatgatgagcgttcacttggatttcatgctcttggctatgggagaggttctcggaagcctgcaatagtaattacatcatcaggaactgctgtatcaaatctccttccttcagtgagttggaacatttctctttcttactttttttatttccttacttccagcctttacagaaatacccaccatttgctgaaatcacaattcaacaagtcttgttgctataacttcatctgtgtagtgtatacctttatgctctctatgtgctactacaggcaatccatgcagtaatggatatatcaactattgagaaatagtctatagtgtttaatcaagattcatatgtaggtggtggaggcaagtcaagatttcgtaccacttattttactcacagctgatcgtcctcctgagctgcaggatgtaggagccaaccaagccatcaatcaggtattgtaactgaatacaatattacaaaaactaaaagtttctggcaatagctcctattctgaaaagagcttcgaatcagcactgttaattcagaattttggctaccttttaattgccttaaattgcttataagtattgtcatgcacataaagccaatcatgttgttcccttaactatgttttagtgtttattttatttctcagcaccatcaaaattatgtcctacctgtacaatccatatatattcctcacatgacctatgtgtctcactcaagcaaagacatatacagaacactagtcaaacccatacagtgaacttgagaagcaaaggcctatattcctcacgcaataagacccatacagtgaacttggaatttgctggattaccattccagtttatgcatatagttttatgtttatttccttttaatggcatactgcctctatagcatatgcaaacttatctggtaagcctatgatgttcttctgttattcttgtgaagaactcgtcacatttttttttaactattttcaggtaaatcattttggcagttttgtaagacacttttttagtctccctccaccagatgatcatatttacgcgagaatggttcttacaacagttgattcagcagcctactatgccatgcaagcaccacaagggccagtgcatataaactgtgcttttagagaaccactagactacggatatcaagattggagtgttgactgtttgaaagggttggacaaatggtttataaatagagaaccatacactagatacctaggaatgaaaatggtttctgcattaggtaactattcttgttcagtaagggaggttctggagattgtaaagaacgcaaaccaggggcttttattagttggtgctattcacacagaagatgatatctgggctgtgactttactagctagacacctttcctggccgattgctgctgatgttctgtctggattgcgaatgaggaaagtacagaaatcaattccaggactagataagagcatttgttttatagaccacatagatcaaattctactgtctgaatctgttaaaagctggaaaactccagatgttattgtccaggttcatctcctcactgattcttctttttattccatacttttgcattacctaatcatttgaattccttttcattatgtgatatatttataatgacacctttctttttttttttgcttgacagattggaagccggatcactagcaaacgagtgggaacatatcttgagtcctgctccccgtcttcttacatcttaattgatgcacacccatgccgccatgatccttcacatgttgtcactcacagaatccaggctactataactgaatttgctgctagtctgtgccagtgtaatttccaaacaaagacaagcagatggtcagatattttaatggttctgaattcagcggtatggtccataagagggtagttatcttgaaaatatgcaacaaaatattctgatagtatggataggataaaacttgtccttatgtgtaagcaaccttcctgaaccttagtcatttgtttcaatcattttctgcagtaaactttggtattatacaccctacacccaggttatagtataggtaaaaggtcaccacaaattgatttgaaatagtattgacattgaaagttgaaaactcaattgatatttaatgtctctttctgaaatctgtaaatagcatgcatgaaggggtttatcacttaaccaactgcctctagttcatatatttgtccccatggaaacttgactacataaggaattcaattctgtaagcatgcccttgaacagattttttctggaaataactaacaaacaccttttgttgccatcatctgcttttttctaatcctgataactgttgtttattccaggtttcacaggagataatgtttcaggtgcattcagaatgttcacttacagaaccatatgttgctcatgtaattggagaagcactttatggcgatgctactatgtttattgggaatagcatggtcattcgagacttggatatgtttggcaagggctggattgaccatagtacaaatgcaaataatgctatgatgcaccattttccaggctttcttggtgcaccagtagctgggaacaggggagcaagtggtattgatggtttgcttagtacatcaattggatttgccattggatcaaacaagcatgtaagttagttatttagctcatatgggtacttcatgtgatgaaatttgttaccctagatatggaatgcataaatgcgcttgctgcagctgcacaaacttggggacaatgaaaaacactatgcttcaaagagaatattcctaattttcatcacagccacctgcagttctcaaactactctgattatcttataatatttttattgtgtatttcctagatactgacagttgccaatgcatttatgctgtacttctttttgagtaagcttttggcagaaatttgacttggctgcactattttcaggtattctgtgtgattggtgacatatcttttcttcatgataccaatggattgtcacttctgaaccaaaggtttacagtttgaatctattctatgctatccaccaccgtttgtttttctgcgagtcattggctcattgtcatttccttaatttatttttcattgacccaagcatttgtttttgcattactacttagtcaaagaaataaaaagaactacagatattctctctgtaaagctattgtataaccatctacttaaatgaatatttatttctgataaagtgataatgcatctcacattcctgaaggacgcagaggaaacccatgacagtaattgtcattaacaaccatggtggtgcaatcttcagccttctaccagttgcaaaaacagcttcactccaaattttggagaaatttttctacaccttgcatgacatatcgatttccaaactctgtgctgcacacaggtaaaagcgattgttgtattctggtgcttacatacctcggccttgcttatagaaatacaattttaacaatatgcctgcctgatgctaacgtagcatcgctgttactgattctgggatttattagatgttttctgctgagacttctgcctgttacattattggttatggagtcagctgtggatacaacaaataactttctggtggcaattttgcatccccagcattctcatgagttgtatttcaggataaaacatattctagttcagacaaaagctgaacttcatgatgccttagtgaagtcccatgaggggcatgttgattgtgttgtcgaagtggagaatcgcattgttgataatgccaactttcataggttttatattcaaactagttcttttgattattttggtctacatcgcgtttatatgctcattctcattctgcagaattataagcatgttcacagaccatagtgcaaccatgcatctggcatatcttctgggaggtccatattgtaaggatggggtaaatggcttttctgttggtagaatacatgcagcagaatacatgttttacaggtacatccttaaccaatcaatacacacctcactcctgcacaggtcacacagcctggaaattctaaacataagtgtagctaaaccatgttttggattttgcagctgtacaaaatttagagaaaaaaaacatgcagggcatgctacaatgtgcagagacacaaattgtgcaaatatatgatcaaatgtattgtgtatcaccacacacaaaagacaagaaagtcatgttttggattttgcagcttacaaaatttagaaaaaaaaaacatgcagggcatgctacaatgtgcagagacacaaattgcgcaaatatatgatcaaatgtattgtgtatcaccacacacaaaagacaagaaagttattgtttgcaaaagttctgataagtcatttattttccttttggtacagtacaacgattatatttttatacatatttttttgagtgaacatattttaacatagatttttttatgaattttcaaaagtatacaatgacaaattacaaagtgtgtaacagtagttagaactgggaactctcttattttaggatttaccttctatgcaggatccaacttgctgcaccacgtacatctgggatatcagaaagcagcttctttcatgaaggtttcatactaaagttatgtgtgggtgacagcattgtgggattcggcgaggtttgattttattactactgtaatctgtctgttttttctaactcattgtgggccttaattactgttcttgaattatgctatactaaaatgttatcttagttgtctactcacagttttcaagtaggaaatggactggtctggagcatttctcctttacaatttttttagcttgatccaaatactcatggaagcatggaagtgggtccagatctaaactctgactttaatactagaaaaaaaccctcagaaccacagagtgggtgaacatttacataaaacactaattaaaaaaatactccagttaacataatcatttgaccttgtatattagctgaatatatgttatagcagtttaaggttacttttcatgttgtgcttcaaccagaatatctggcaaacttgtagtaggcaggatatttttcctcgtgcaaattaatttggtctaaaaattaccttacctcacagttttatacttgaagaagatgttatccttcaaatggataatacagaaaaatgtttcttatgcatgcccatgtttcactgaaggaatatacagcatattactggaggtttggtgttggttttacagtagttttattttatgtttattggcttctagtttttgtaaacttagttgaggctggtctgttatttcttcattcctcttaattgattggcagaactcctaactttgtttcgtctaaaaatatattacatgttgcaccgtgcatttatttagcttttattaagtattattttttacccttgtaaaataacaggttgcaccaattgaaattcatgaggaggatctgttggatgttgaagaacagcttaggtttctctttcacagaatgaaagatgctgagctagatgttgttcctttgttgagaggatccttctccaattggatatggacaacccttgggattcctgtaagttgacttaagaaaattttctgtgaaaaacatacgagagactgatatttttccgcgtgttcttcttcacagccttcttcagtattccctagtgttaagtgtggtctagagatggctattcttaatttgctggagtcacaacgaatagatagatcctatggtatttttactggctccaatgtggtcgaatataatcagagcagcactgcaaacatacagatatgtgcactcgtagactcctgtggcactccaatggatgtaacacttgctgttgtcaaacttgttgctgaaggtttcaccaccgttaaactgaaggtaaatcttctaccagttcagtaattataggaagttgaatttattagcttctaaaagaatctgtacattgcttctttttaaaatctcccaaaggttgggcgtcgcgaaaatcccgctgaagatgcagctgttattcaaaaagtaagggaaattgtaggatacaagatcaatatccgtgctgacgcaaataggaaatggacatatgaacaggcaattgattttggatccagggtaaaaggcttatgtttgcaatacatcgaggtaatctgccttttattcatctgatatgcatcgaaaatctaaaatagacaaagcattaaatttgtacccagcatatcataatactggttggggaagagactgtttttcatgcagttcttccttgagagtcttcatttgttttaaccacaggaaccagtggactctgtaaatgacatcatcaagttctgtgaaaatagtggcttgcctgttgcactagacgagactatcgacaaccttacaggggatgtaatccctaagctacatcaattttcacatccaggaatagttgctcttgtgagttcaaactttacgggctagttttcaagctgatgcttcattttctagatttgacctcattttcatgttgatattcaggttataaaacccagtgttgttggtggctttgagactgcagcttatatagcaaaatgggctcacatgcatgataagatggctgtcatcagtagcacctatgagagttctgtaggtttggcaacctatatacagtttgcacattatgttgacagacaaaatgacataacatccagaataaagaacagaggttcttgtggaaatgtggcacatggacttggaacataccaatggttaagggaagatgtttcagatcaaaagttaaaaatccatgcgccaccacttggtgatggaatcagagcttcggcagaagatgcccatggctatctccagcatttagttataaacgacaagaagatagaaagaacttatagtgaagaaaaattgaggtcatatttcatccaagttgatggggataatttttcttatcaagtcaagcttcaagagggtggtgattgcacacatgtaagatttcttcaattttcttttgaaaaccaacagtttattaccagcttgttatataagagggtttagattagtgctcagtgtctgacacgagatccatggctagatatttgcagtatgagagcaaattagatgattaagttgcaaacagcaggagctattgctagtagcatattaactggaatatattgctaagcatatcatagtttcaaaagatggaattcttttaatcgacatgtatcctactttactcgggatttaaggaggtatgctgtagaccgcggaactatcacaaaggtctgcagaatattgttcacgtattgatttaaaactactgttcttagtactaacagttaaaattcaagtgaaaacattattatctccatatgaatgattcaataatatatttgataggtccttggttcatttcttgaaggaagcacattcataattacatgttttctcttgagtttgtctttcttgctaattatgatgttatctgttttctattcacatcattcaatcaatggacaagtttcatacattctgggagtgctttgacgctctcttttcatttgtgtgccttgttcctaatctcagtaatagttaaatttctgcttatgtttttactcctttgattttggttgtccagttatccacttaaaaaccagatgcaagcatatgttcaattatctaagttttacttgcactgtatacttgagatactggtagtttctccgtatgtagtaagatggtgctgtcacagtaactattgtcatgatttaaccaatgtaggaaaaggttattctctttcttcatggatttcttggtacgagtgaagactgggttccaatgatgaaagctctctctcctagtgcacgggttatagctgtcgatcttcctggccatggcgagtccgaaattctacagcatgatgttgaaaactccaaccaaatctccttttcagttcaatcagttgcagatttgttactgaagttgataagaaatataactgatggagcggtggttgttgttggctactcaatgggtgcaaggattgcactacacatggcattaaatcaaaaccacaaggtaaatttctcgacattgtaccttttgtgtttatttctttatttttatgattctaacgcagtcccgttaagacagataagtggagctgttataatttcgggtagtcctggattgagagacgaggcaagtaaaagacgtcgtagtgctattgatagatcaagagcccacttcttgtcttcttgtggactggaaaattttctcgagacgtggtactctgcgaaaatgtgggccaggtaatattgttatgcagtgacaatatacttttgttttgccaaaaatgtattgacatgccttttttcttttccttttctgggatattttctgttgatggatgaccaaatttacagtttacgagaacatcctaaatttgattctctagtgaggacacgaatgaaacacaataatatcaaagctctatctaaggttctcgctgactcaagcatagggacgcaaaagtaaggcttgccttcccatactccgtattatatttttcattgatgatatccataaagtcatgttccatcgagtccgttagtaattttgacgttaatagtggtaaaaaatatagtgtgccgatgatacatatagagcctgtgaacactttgatggtcatattacattagtgattgtgtaataagaaaatcatgtgtgattcgatctcatgttagtttcaatgttctaggtccctgtgggaagatttgaagcacttgaagagccctctcctcatcgtcgcaggtgaaaaggacccaaaattcaaagagatatcgcagcaaatgtgcagggagataagaaagcacaaggatcgcgaatccgatggtctatgtgagatgatcattattccagacagcggccacgccgtgcacgttgagaaccctcttcctttagttagagcaatcaggaagttcttggtaagggatataccagacgtgatatccaagtagattacgaaatggaattatctatgtagaggagttcaagttacagcgatagccagagacagcagagcagaccaactctttggtgcggatgggtgcggcagttctggatgctattctgccgccggtagtctcacctacaccagcccgggaactattctcattgtggactggtgggggaggattaaagattagatccagagagaagggatgtgactccattatcatgcaaagttcctaaccatgtgacagacttggtaaggaaagaacgcaatgcgagggtcttcagagatgaagattcttccctccaacgagtagcaggaaaaatcatcattgatgagcttcacgtatagcggtataggagtacttgtgaggacgaattctaggagtacttgtgtgctgcagcattgtcccgagctgtacagtgctcttttcatattttgctgctctgtatatgctgttgcctgttggttagttgccactctctctcgccgtgacccttttttattaatacaaaatgatatgcaagtcctatgcatatccgtgaaaaaaacatgttggccagcttcacatccgagctgagctcctgacacagtgacactactggggaaccctttgcaaaccgagatatctaatccgggactaagatatctcgaatggtgttgtcaatcgggactaaaggtatttttttccttttttttcattgtttattactacttgcatattacccaaatccgattgaacgtacatactcaacaacaatttgataccacagattgaatgaacatattcaacaacaaaatcatacataactcattgctatgcacaactcctaggctgtgtttgtataacgatgcgttttttacaaaaagtttctatacgaaagttgctttaaaaaatcaaattaattcatttttgaaaaaaatagctaatacttaattaataacgcgctaataaaccgctccgttttccgtgtgagagggattagttcccatcactggaatccgaacacatccctagtctcacttgcaaaaaggggactaatttgcagctacacttcttcaaacagaagattaattatatacatgaacattaattctgaactacagtccttcagaaaataagaaaaagagaagagaagaacaaagaaagaaggagagctcctggccgcgctcgccgcgatgctgttcgttcgcgccatcgccggcccgggcccggcgctcctccctcctgtcaaggacgaggatgccgacggcgatggcaacccggaggccagcggggaaggaggcggagtgcctccggtgacgataaggtgggcccgcatcacctgtgccgcctcccacccgccgacgcctgccaccgcccgctgctgacgccgccgacagaggggaaggggaggaggggagagcggtgtcgccgcttgccgcccgctgctgacggagaggggagggcgctgtcgccgctcgccgcccactgccgacactgcgacggcagagacgggaaggggaggagaggggcgggggaggcctaacatgttgattgctaccggttaaaccgcagtagtcctgccgtagactgctcgccaattgtcggtctgaccatcgggatccaaaaatcacatatcgacgagacgaaactcttgaaagtagatcaactttattgcatcaatatgtgtttacaaagtgtatctaaagcactcctctgtcaactagtattgaagcctcgaagcaaaactataacttttctctcctaaaaaattgatatacttctagcatcaacccctcatctatttatatcctcaacgtggctacccctagccacaaatcctacaagaactagaattcccaatcacataggaaacctactcaacaaggtaaacaacattctcatacaactccgcgctctaatctttctaaacttggacctcttcccatacgtacacaacactatgtatatactttatggaaaccttcactccacatgcatggtttctagcctaagcatcctgtgtgatatgaccatttggacctcaatttcttccaagcctagtcctgatccattaccgactatactcacataacctcaagcaacacctgcacataaacaacaaagagactctctgtattcgagtataagttcgcaccaacttgactcatatcagcataaaatagtatcacatacaaaaagaaacatctaaaagtcataaacatgaagcaatttagaaatcccacgaaaacaacccgaaaccaactacaacccagagtctgctggtctaaccgccgggctatccaacacctccggtctgaccgaccacccattgctgactgcactattcaccgaccgaaaacattattcactgtattttcaataaacacttacttttgacaattgtttatcacatagattaaatcaacacattaatttcacagtaccaatcgcctacaactacaataacactgctgatcacctaggtataaagcaacacatcattatggactttaaatgggatatggtgttacaatctcatctgctcaaagctgatcgaacaaatgaagtttgcagttgtaaagctagaaatgaatctgcttgatttgtgcaataaaactatgctcgaaaccacttgctccatgtgttttccgccttccgtttgcaatggtactgttgctaccaagttgccgcggtcggttacttttgtgggttaaaaccgtgtcggaattcgtaataaccagccgactgcacgcagagagaggcatctcacacctccgccttctgtgacttctgtcccgattcctgaatgttggtttttcaaaacttcctaggggtgcgagtcttgatccatcccgggtgccccttgccttggatcctggtcttttaacactagtgtcagtgccgtagaatcgctctacaacttccctctttttataaacgagaaaacctgccgccgcgcaggcgcaaccatgtgagaagtgttgcccagtcacacgctcacacacgccctgatcccaacacaaaatttttcatcctgtcatatcgaacatttaaacacatgtatgaagtattaaatatatgttaagtaactaattacacagattacaactaatttacgagacgaaccttttaagcctaattgctctataatttgagaatgtgatgttacagtaaacatatgctagtgacggattagttaggcttaatatatttgtctcgcggtttattgatgattttataattattttttattaatgtcaaaacactctatactacacgccaaaactttacaccacccatgtattagaaaccagtctcatggcgaattggcgagatgtgtgtgtggtgttgtggccgattggccgcgggattccaacagggagctcaactcccgaagcccagccactgctagctcgatctcggcagaaggcacggcaccggcacgcattgttgcagagcccacacgtggtgcatcagtgcgtggcatatggtgcaagtgcaactaggaccgagctgtaaaaaagaacaacgcctaggcctagggcttgttaaacaagggtagaaacaggagtacgtacggcatataataacagtgtgtgtaagaaatctgagatgagttttgagcaaagcctttgaccacgccttcctctcagctgactgacaaattaagcggctaagcatttgccttcctataaagatcttactactcgatctaagcccccctctcctctgtacactgttaattttctcactcactgactgaccaagctagctaagctagagcagaagagcgtagtgcatccagagaaaagaagcacgtacgccaagattggagttcagttcatgttcatcatgagttgccgaaggacttcgagtcttcttgtgatcgccttggtcatctccttgctcttacttgaccgtcccattgctcacgcacgccattgtaagttcatattcatctttgcagcaattaattgttaccatagtttttctctgagaaaagcaccatgaaatttgtggcaggagcatttccctttttctttcttcgtatgttcaactattgttgattttaaccagtattactatcttttttgcagtgaagaacacgtccatgtcgagccgtggttcatcaacagaaagaggattagaagattcaaagaagaagctcgatgaggagaagaccaagaaggttgaagccgtgcaagttggatcaaactctgtccatggagggagcccggatgttcatcagtttgcgaagatagtagtggttgaacgccggggaccaacgcctcaccctaagaagcacaacttatgagtatagatagccaagatagatggatatatagctgccaagttcatcccgctgtatctattttgatttagactagcttttctttttctcagttttatctttctctccctaggctaagataggagaggagtgaccaaactccatagatcatagctagtagtgtactactttccagcagcacgtcgttgagaaattaacctcaataaagatgtcacatatagcatcttttcaattttgtagcctgtatttgactactgatttttcaatttatttagaattttttttgaaggattcaggggtatccgatccatggcgttctcttgagtccagagagtatttgactacggaattctcaatttatttagaaaatttttgaatatggaagggaggaaaaaactagaattttttttttgaagaattgatggatacccaaatatccaatgcgtcctcaagtccatgttgagagggagattgacaactgatttctctaagatttttctaaataaattagagcctcttaagagggggataaaaaaaagttgagagttggtaaagagggggtcaaagtgcgcgagccctttttgccccccacaagagagaaataagttcactttgggtccctctattttttgtccgggtatgatccgtcccccaacttacgaaaaccgggcaaacgtgatccctcagcggttttggctggcgtgacgcatacgtgacttgtttgaataggtctttcgtcccacgtggcattgacgtggcgcttacgtggcaattatatctaaaaaaaataataaaaaacgtggccccacatgtcagctgcacaaaaaaataattttaaaattgtgggggccatgtgggccccacgtgtcagtctcactcctctcttcttccctctcccttctctctcttcttccctttcccctctctctttctctttctcaggcagaggacggcgcgggtgggcggcggagcaggcgagctccggcggcggcggtggccgtggtcggcgccgccgctccgcgtgaaggcgagcagcgcggcggcgccctagacgccatcgacgctgccatccatgtcgccgccgccgaccacccggacgccctccgcgcgcgccgggacggcattgccaagcgcctctacaccgcgctcgtcatgctcccgccgctgcttgccgccgctccacaagccgtctacgccgcgctctcccctcccgacgccgtgctccgtctcctcgcctccctcccctgcgcccccaattccttcatgctcaacaccacgctccgtgccctcgccttctcccccaacccggcctccgccctcggcttcttctccctgtccgccgcgacagcggcaacagcagcggcagcggcggctcgtactcccctcactccctcccgggcacgcgcgtatgggaaaggggaagaggaacgaaggagctagagccgtgccgagctccctcctctcccgccggcgagctagaagggcggcggacggctaggcgagctccctggcctaccggcgagcgcgcgggcgtcgctccctcctctcccgccggcgccacacctgtgcgtcagccatccgtgtgcggtccgtgcgaggcgccgctccaggcgtgcaggcttccacgcgcctccttcctcgctcgccgtcgccctcccttccactggtaagtgattcgctctgctccatgtgcgtgagtggcttcgagttcgagatggcaaatttgagtaaattccggagctcttgaacttttgaaattggttccgattctacgtgccttgttcttaatcgagtgtggtttcaatgtacgcgtgtgtttctggaagttcggtggattggaggaagggaattggtttgaactttgaactaacttggagtccctcggttggatttgagcatctgtgatgaagcagtggagaatcgcctcataaattgcttgtctatgtttgcattgcggtgatttgaaccttgctgctgtgatttcagtttggttattaggcgatcgcaacataacccagtgaagcaattctggtgctgctgtttgaatcctctagctctggattgtggttaactcttccattctgtcgcatttggccaactgaattgcctgttctgtttgcgtttctgcattgcagtatgtgaatctcgttgctgtgaactcaatttggtttgaagtgatcgatcgtggtcacaacttaatccatctgttgcgcaagagagagatggccgcctctgccccacgcgcctcgcgtgccgccgcgcacgccatcgcccgccgccagccatgcgctgtacatcgccggcgccgcctaccgccgccgcgccgcccgtcgtgctggacgccgcccggcgagaggagggagcagagagatggggagagctggagagaggaggaagaagaggattggatttgatcatttgggaatgacatgtcatttgggcccctccatatttatttttaaattattttttctatggttgaattgtgggaccacgatttttattacttttccaatatacaattgccacatcagcgccacgtggaacggagaactagtctaacaatccacgtcaaccaaaaccaccgagagaacttgtttgcacggttatggaaagttgggggacggggcgtagcccggattgggcgacaaataaagaactaaagtgaacttattcccacaagagaaggctcctcgtctccttactacgtggaagcccgcacctgtggctaaagcgcaacccaaagtacactcgtaaagcggtgcgagaacacatatacacagccgcctcccgcctcccccccatttatatccacacttgcaaacgggctcgcgaattatcacgatgaactccgctaagtggtaagctcagcatgtgagagttatttctgtccacagacccgcgacaagcacgcgaaatatcacgatgactgctttaaagttagtgggctgtgcgggggtaaaaagtttattttctctggggcctttatttttttgacatgggctctaccgacactgaccccgggagcaatgcctgcctcgggtaaacttagacccaggacgagagactagcgcccccacggatatccgactcgttaccaactctgccctccaaagaagctggagtttaaggcccgcgctaccaggcccggcgatggagactccggggcgcactcctttatcctgggggacgcgctccacggcgagcggtatggtactaaaaaataatagggtcggcggtgaaaaaaggagacgtgccaccggaacggtgagagaagcgcttcccctctcccctcccagtcccagtcccatcgcgacatcgcgtgatgaactgatgatcgccccagtttcagattccagcactttggtcgcagtttcagaaaaccagatgtcagttcagacttcagaattcagaccggaagacgaatattggtatgatgaagagaaaaggaatacgttctagctcctcaaaggctcaaaccagcaaagatcaacacaaactaatttttttttacagatagcaatgcaatccaatgatccatcaccccctaggctacacgctatttatacacctcttcactcctcttctcgctcacggtacagagttacaagccactgacaaaaccgacaagccatcttacctgctacaggaccaacaaaaaagaagaagcagggtatacatatatggcgtgcaaatcagacacttcggtggagttacagatagatttcgaccgacttcagcagcgcatcagaatttcagagattcttcaggaggtataagaaaaggggatgctcagaatttccagcagaggaagcccttattccagccacggcgccgcttgtttcgcctccgctccgctctcgccatcctcaccgggctgctgttccaatcccactgtaacctgttcatccaccaaagcagcacatacctcccaactttcagttttgagacaaaagttgttcatgaacacaaaagaaggtttaagtttatagttgtaacatgacagagtggatgaggatggatgcttacactggaaatgcgaaggaccgggtgcttgtcgtgctactatctgaccggatggagatgttgccaatgtgaccagaggtcgacactgggttgcacatgatgctaggcccaagagagcatggctcaaggggatacccattgccaatcagagattttccctttgcattattatcaggcacatctagttcatccacatgagtggaatccttttgcgcatcggtagaactcgtgctaattctgccatcgtttgttgcgtctgcgcagctctctgaatctgtctggttgaaatcatgcacatcagtagcaccatcgttgtcagagttcttgttgttcatctgcctatttgcatcactggactctacaacatgaggtgatgaggatgtggccactgcattttcatcctgtggatccgctatcggctcgctggtgaagctttcggggtggtcgttgctcttttcggatggttggacttctgaagaactacttgatgtcagagcatcaggcatggcttctgctgttccaacttcgttaaattgtttggagccaattaaaccgtcagtagtctcagcagtggacatgggtttatctaatgctgcggttgcatcatgtctgtcagatattgttgctgatgaaccgttggtgttattgatacttgatacgttgctagtaataagttcatcagtttttgatgcagttgcaacatcattgcagtcatttgtggaaacctgcaatgtggtgtcaaacctgtttgtcagtctaaaaaaccaatctaaggatgattgaacttctcataactatataattcaagttatcacccaaaagagtagggtcaggtaataaaaaaataataatgacaaacctggtgatagtggtaatgagaaaacaaatttgattacagattaagccagtaacttatgtggttacctgtgcaatagcctcttcatgaacagggggcatgtttttttcatttattgcagaagttgtgctttgatgctgggtctgggattcttctgcactttcaagtttaagtctttccttggattcttctgcactttcaagcttaagtaactcatgcaaacttattttcttctcactgatatcactagcagtatccctgctttcaagatcacattgtttctccgtgttatcgtcagcagcgaatccaacaggtaggagaacagtttttggtttctgtccatgtgcatattttttagcatcacctttccccccatatgttagatcactattcgtgtctatcattaggaaatcaaaatttggtggtgacttctcatctaactttttttctgctgaaattttccgatgcggaagtactccttcatcgatgcagacatccttgacaaaattgccaccataatcagaagtaacaacagtatctggcaattttatctccaaaacatccttgtcgtaagaaacatcatcatgtactacatgtccagttatatctatcatatcttgtgttggatttgaggcttctaccattttccctatcaaaacccagccaatcacttttctcgtatacttctgtgtccagtttcagtctttcagaccaaatgtagctatcaagctacctccatcagaaatttcaccgttgtcaaaattttcatcatctgtcaagccaatacaaaaatatcaaaactttcacaaggcaaaaaaatatatttttaaataaatgtcatgctagcataccaagttatcttttttgacatataacccaagactgactactaatacacgatgaaacatcatttgggcaaatcctacagaatggaatgtaaattcaacctaattaagatctctagcattgtcctcttccattttggttgctaaatcacttttaatcagttataagcattaaattttcctgtagtgacttgtgactgcaaactgccatcttcctaaaatatagtatatgaagaccatgatagggacaattctccccccagtctgaaactctgaacaaagaagctggtggactggtggtagtcttggtggaaccaacgtatatataagcataagaccacgtcaagacattgatttttcattatgagtatcatgccttcccacttaacaaatcaatttttgacaggtagagctgcaaggcctgcaaccgagatcgatcgagaccccgaatacacacaattggatccttttctcactcttaagaaaaggccatatcccctttcagtgtccacaagttgctgaaaaaaaaatgtagactttcattttgattgggatcaagttgaatttctgcattattattactaaaagtggttttcagtttttgtaaacaggctacagctatggagtcaacagagtaggttttaggtagtgaataatcagtgttcgcaactaacgatgaatcacttgctggatatcctaatttttaagtagcagttgactaccctagctactctcaacacagcagttgactgcacaatttcttacagcttacaagaacaaagaatattggcacccttactaaccaagcaaagttaacttgaaagtaaaaaaataatcctaaattttatcccagccacagtgatgtattgaccgtactagaaaacagttggtgttcttacctactgtgagtagacaagggtgcaactgaaaaggtcacctagtttcacgatatagatgcagatcttatggagaaaagaattgcttatgtcctgcatgcgaaagaggtataataagatgggaacaacggttaagcagcagcaatatgagttctaataattacattgaatggataaactcgaacaacttaatataatcagaaaagttactgcaagtattatttttttctgtggatattgacaatattactagcaacaaggaatgctgattattattattattttttgtaaactccatgctctcgcattatgttaacaaatccggtcaaaataaaatgaagaaaattaacacgaaatcttgaaagctgtcctgacgacaaactgaagcatctcacgtcctttgcatgagctagtagtagcctagtacaaaccgcaacatcaacagaaaaaaacatacacaacaagcatactcatctccaacacaaaatgaagaaacgtacggtttaagcatgctaggcatattagatttttcccaacagatggcctcgaaaatactacctcgatcgaaaatcgaaatagttgtttgtgattgtaacgaattctcctttctctctctggaaattaacatacagcctctaccatctgtttcagacttcagatgagggaaaacaaacgacactgcaatctattaacccaaaatttttcaagatttaaacttcctgtccaattatttaaacatatttttttctaacataaaactgccggtttatttgcatgatacggagtacggagatgcgccatcaattggtgcttctcctcgtcctagacatacagtacaatacagacactgtctcctactactcgtcaagaacagtttagaacacattacgcaacaacaaaatacgcagaaataaatcaaaacaagaatacatcgatcgggtctacggccacagattcaagaagctggcaggaaacgagaggaaaaattaatggacattaactacatggagcaggcgttgtctgcagctaggtggcgccctctccccacacacaccgcagttactacggcacaggccggcaggcaggaaagggagagcttaaccagcaagcatgaggagacgcaggaaaaaaaagaagaagaaaagattgctgctttgatcttgatgaaattcatatgagatgctcatgaacaaaagtttttttgaaactatgttgctttttactctgtccaagcccacatcagtttttcttttaaaaaaaatcagagtggagtaagtgagtttgacaagagagaaatttacagtagatgatgaggaaagaagaatcaaaagcaccaagaactcatcaacagaagattagaacgaaagatatgagcatagcgatcaaaagaaacgacgataagagagagagagagagagagagagagagagagaggaaagatcgagagcaagaactcacctcaagttcagataaactcggcaactaattctcttctcctacctcctcttccaaaatcgaaagaaacgtcaaggagagagtttgcaagcagcagagggagaaggaaggtatgagtgagcctacgggggatcgcaggaagcctaatgaacaaggaattcggaagtgaaggagaaaaaaaaaatctgaacggaagcatggacacttaaataaaaggcatgagggcgcagagctgtgcaataaattcgatcgatgctctctctctctctctcctccctcttccctccctctctggatgatggatgtgttgtgtatatttacaggccagtccttggattgcttacaacacaagttgctgggacaatttgttacaagtgttccaacttttgtggtttggccctagtgtgtagggagtattttctcatgagtttttcagaccaggtccgattcagttgggtacttgtatgttcatgttcactaggaagaatagcattttcaggtgtcaaaaccttgtgacctgaaatgtctttgaagcacactcaaaaaatgactttaaagagtatactgtaaagaaaaaaaagttcattttactccctcaaattattccaccagatcacttaaccccctaaattatttttggctcattcgactccccgaactattgaaaatggttcagcttgctcccctaacactatttctcttttttttttctctctatacaaatcatatttcgtaatcaaaatttggtagaatatagatgcatttagaacttacatatgaactttttttttgaatttttctaactatttatatagttcgaaagcacttaagactgatttaaacatcaaaattttaaagctgaaacaagcatccacgaaaaaattcgaaaacattttcaaactttaataatggtattagttatggcctaaaaaatttcaacttaaaatacaacttgtattaagagtaaaaaaatagaaatgttattaatcagtaaagtgatccatttttaattgtttagaaggtaaactgaggaaaaaaaaacctaaggaggttgagtgatccattgaattagttaagaggagtaaaatagaccttttttactgttaaaaataatgtcttggttgcgttggagagtatcgaaaagtaacaaaattcatatttagcgaaataaggtttatgtggctatatagatggttctttttaagctcggtgagaaatagagatgcttttttatttaactttaaataattattcttctatgcagtataattatttttaccatacaaaattttgtgtaggttatggatactccacggtgcatgttaaaatatgagcaagtaacttttgaacttattttctaatttctaaatgggaaaaatatttttcgcactaggccatctgaaaaaaaaactctaaatttgacaatgttgatagtttaagctgaattcaaagcacttaaatgtgggagagttgtctcttaggaatatgtgacgagatgctagattactactcggtccagaaaaaaaaaaagcaaattctagctacgaatctgtatacgcatatgtccaggttcggattggatttttttaatgggacgaagaggaacataattgatgttttcctagcatgttcttgagtagcatataatccatttagtatttcattatccatttccactcagtggattttcatcttacagtagatagaaaataagatgatgttgcatttttacttcgactaatatacataatgaatgtatacaggtaagaatgttcctagcaaaaacaaaacaaaacaaaaggaatgttcatagcataattctgttgggattttcaaatatattacaatatataggaaccaacttatggatctgaaattcagaattttgagactcactgcttccgataacatttatttttgaatcagagggagtatatatatcatagagcatatcgcgtatatagaataaatattccattttaagtaaatgaaactatatctagtgaatgtctggtaataacatattatgagcagggcattattgagaaatggtagataagtcaaaggagagaagcattaaatagaggaggaaatggcgaaatcaaaccagcagtagaggacagctctcccacatttaagtgctccaaattccaaaccacctctacggacccaaaatttattagacatactggtaccaacgaagcatttctagacagggaaaaacttttaaaattaaataaaaaagtaccaatttgatttttttgcttcaatttcatagtaaacgatgtaaccttttcacgtaaatagaatcctaattcttgctatttggaatggatccaattatattgagtctagctttcttcttcgagctaaactaatgacctttttgctatgaaaatattttttttccttcgaacaaaactaatgtgaagtccttttcatcatagtttaagactggcaaaacaaatattggggcagatgtactgactgtgaggtttgtgtcacttgataagatgttagcgtgcgaaataatatactctacacataacaacatgtcacgctactactcttacatgttttgcatcatggtactgtgtagtaaatgtggtactagaaaggtacatttattagtttctccaacagtctgtttttggacaaagttttgtttttcagtctaaaaatgtgttgctttctgtagctgtttgtcactaaaacatatcaaaattgtcatctgaaaaagacaaaaaaattgcaacactttgttttgtaaaaaaaaatttaacaagaatgtagtcttctttataataaagaatacaccttagtatattttgaccgaagttttggaaattttgaccgaagtttggaaattttaaccacataacgacttgctgcagtagctggaagtaatttgtggattatctgaaattttattggaagcaatatttgtttatttaaggtgggaaagtataaattaaacttgacaagttcatttccagtaattgatttagtatgtatcttggcgtattattctttccaaggaaattttacagcccaattagtgtgtatcatctaatgaaaacctataatcttcagagagaaattttggtcttagattgattggcaatatttcatcatatgaaattttgattgatgaaagccgtagaaagaatctctgaaaaaaaaaagttttgctatatggatctcattatattactacaagatagagacaagatgtcaccaaagccaagcaagtactctattggcagctcgtctgctaaattacaagcccaaccatgatttgaattttgaaatatttgataaaaaaaataaattttgaaatataattttaaatatatctagttagttttcatcacttttctattattcagtcttgtttctacaacgctaagagtagaagtgtaaaatttctgccttaaaatcgtttttggctgctactatattgacatactagaaatgctagactctcgaaatcaagaattaaaacattaatgaaatgcatatacacaacaccatcaagctaagccatctaaaccacatcctgccttccgttaggtttcgtccgatgctgaccaacacttgatggctcataagtttcaggaatagaccgcccaactaatcgaaacattgaaccgaaatatttcagcttagcttgcacactgacgacctgacagggatgcagtcaattcggcaaaaatatgtttaattcaattagccaggtcatatgatctgacttgtgttttcttatatatacaacatgaatatgtagtacacgaatgttataatattgtcaagggacaaacgctagaaacctggcctgagctcactagatttgattcatgagatagttttcagtgacagtgctaccatattactatattgctaactatgttctgtttcatccgatagatcttcctttttgaattcccatatctgaattccgcaacactgcctactcttcgttttgaaagcaaacaaaagaggagataatcttagaaggatctttccatgtgcgagagccatttggccaaacttaattaagcagagtgcatgttctcatgaacatgggatgcgcttcctgttagctaaagtaagatacatataagtgcaagtaattaataaattgtattgattcaagtgactactcttgtatgatatctgatcttgggctttgtccattcagaagggcaatgtgtatatttgcattgaatggaaagagactcagtattcagtatttgcaaaccacaggtaaaagcaatgtctcatggcatgggccgagcagatctaaatgtagagatgccattgttgcattctaaatgaatgcttaatgcgtcttaagtagtttggagaaagaatgacattacacagccgtgtctgcagaacgaaaacctgtacaacaccttgagtatcaagatctccattaattcatctaccctaggactagcagctggggaaaaaagatatcctttttgataccaaagtgacaaaaactggaaaggaagcaaatcaacctaacattacgatgaccgaaaagaaagacggcaatcaacctaacattctgaaaatatcctaggaaaatgttcagcatctgtgctgacagttcttctcctgaaactccccggtcaatggagcagagatgatccaccttctggcttctgctcgttgcagcaacgtgacattatgtttagatcctacaggatgttgggcacttgacttgagaatttctcctgcaattcccttatcttggaagagagctccaccttctgctccttgtagctctgaagcaggaagtccttcccttcgataacttcctttagctcaccgacctccctcttgagcatctccaccctttctgcctctcctttccttttgtcgaggccaataaaatgcagctcagggtcatcaacactgctgctatcagcatagccattggcatgcccattggtggcacctgactgccaatgcccagccagcaaaggtttatcatgagagagtgcttctgcaacacaatgatctgcaatgatcttcctcaggtgctgaatctctcgctcagattcgaagagatcacggttagcggaatccagctgagactgcaaattggtggaatgtgtctcctggatgttaagagagtttttaagatcagcaatctgagcttgcatctccatgatcatctcatcacgtttcttgagatgctgcctcagcttctgtataacctctttcttgctatagatgtcagatcctgattctgaaacacaaggagagccagaactgtttgagtactgaaatggtttacgaggatcctcaagtcgatcaggtgatgatatccacatgacgccattattctctttgcttgattctggtcctggtatcttcacaagtggaagggagggttccatctgttttgatgcaggacttgcaggtgcctgctttactcctactccattgcctgaaaaccctgcaaaaaatagcaaagaataaatacttcccatatgttgacaaagtgccatggcaacaaaaaattaacaaaaagtttttaaacacaatttacaatgtggaaactacaacacaatacaatgtaacttagttatattaattccaggaacataaatgtaagaacagataggaaacatgaaaattgcttaattgtctgtaaatgcttcacagccagaaagacaggaataaagtaaagctacaccagcactttctgtgtatcaaagtgctcgataaggaagtaagaaaatgtgataatgacaatagtactccactcatataaaacattatcttcttttctaattttctttctctgtgcataaacattcttctgtacagcagcataattatggtcttaactcttgactaatgactacagctggtaacagacagtgcaagattaggtcttagagttataacaaacttacatatcaacagataatttctgtatgaaccagaaaaattgagcaagttgcaatttctcaacactgttatttagttctcatttctggggatgttgttattctaccattcaaatcgagcaagttgcaattttctcagcagtgctatgttatcatttctgggttgttgttactccagcattttgcacgaaagcatcttcgtcaagagaatcctagtagacttagttactctgtctgtgataagttctcaaaagaacaacgatcaagtgcgctttcatttcatggaactaatcacactatgagctaaaatgagaggcaaacctgatggtagtctgggcctctatagtacagattatagaaggtagcgtggttatttcacggacgactaataactttttcatcccactagtagtgattttgataaaaacgtgccttggtttttggaaatgtcgaagaatgatgcttaaatattttttcccaacagtttggtgtacaactcataattttttttatgagttgagatcgagccttgaaagtgagggaagaagggtattcagcaagtttgaagtgctgaaacaaaatgttatgaatgctgcagaaagtattacgcctaatgtttttccattgaagctatacaaagataatactgcaaattatttttgaaatgcaaatagcatatatgcatatcttatgatactgtaactaagatagttttgcattttaactctataaattgaaggaagagtgataacaatcaaaaccacataggctggcaggtacagcacacagtgataaaaaggcaatagatcgtattaagttacagaagaagcacctgaattacaatggtagcagctcaggtgatcactaaaccggtagagatttgagtgtaactcacatgttcctggccttctttgggctgcaattttgcaaagtcagcagtcaacatttaaaacaatacagacaaggaatcaaggttacaacagcaaatggaggcattagacctttggaagtattactatttcgttgcttcgcatcaaatagttgtttcaatttgcacccaagtttaactgagagtgtgctcagcaaaactcctcccgcaacaagaacccagtttggtcctccttggacattatctgtttttctcgccttctgtatgctcctgttagtctttgacttcatcccagcttgtacgaactaccgatcttcagcgaactgtacaaatgcagtagcttgacctagaagacatgtataaaaacgcaataagcacaacagctcccatatcagtacagaattttcagttataaagacattcatagtaagagttctagaaaatgtatgttccataaaaaagtacagttaaaattgaaactgaaccatatgacttcattgtccttgcaagttgcaaaagaaaaaagatcaaaatgaatcggtaaataacataaaaaatctggctttcgaagataacagcgacaccttcatattcaagtatacagaggaattatctttagaaacagtataccaaggaaaatgacagtaacaatacgctactacccctaaaatggctttgcattgtgcctggctatttagggttcagtttaggttgccttctaaacatctacaccatgatgatatatatattcatagactaacaaacactgaactcacaaaggaatcagctagagttttttttaaagaaaaaaaaaagagaaaaacaactagagtttatacaatcacgttgacaattttttttcttcttctgaaaagtgaaaattacaggttctccctttccccaggagacatgagaacatagcgaattacagattcggtagatgtaaaccatttttcatggtaggacaattcacagaagtccatgaaccacaggtctgcgaatctacccgagttttccctcccctcccctccctccacgcaccgagccgattggattcaaccggcctccgccgtcccccgtcgccggggagccaccttccactttccccggcgacgagccagcttcaccgattaccccgacacaacaaggacgagcacacagaggccaaatcgaggaacacccccccccccataccataccagtgaggaggtcggaccagagtcgtcgtcgacggcggcggcgcggctccccgcccgctgaaattcaccgccggggatcggtgacccgggggggcattgccatcccctgctgctacgcttccgacggcggcgggcacagctccggcgccgccgcggcggaggagtggagagggagaggagatgcgaaggaagtgggcaacggagagagtgggaaggaggagattgtgtgtttgggagactcggaaaaaaaggtaaatccgtttttatccaccctcttcttcttcactcctctgcttcttcttttttttttcccctttggttatttttcgcttttaccttttcctttttggagattgctctgctctctgctttgtttatattcgccaaattcattttgtttgtttctttctctctttttttttgcgagaagaaatttgttttctttttttcatatttaggaatgcattggataattccagtgtcagtattgttgttgcaaatactttggtcaagcggtggaaaacgacatcgatatagaatacggaaaggacatgatacaaatgatagctttttcttaaccccgtaatgttgttgtgttctataagtactttacataatttatgctttgaagtacatctcaatgtcgaaaacattgtagtgttttaaaaatgcatgcatgtttgagcagggacggatctacgttactcaggccggtgtcaggcgacaccgacgactttcggcaaaacctataacaaaattgcttatctatatgttataacattatgatctaaatattattagtatactatggcaccgatagacacgttatgacactaacaaatcggttttctagatccgccactgtgtttgggcttagggtttttcttataaaccgatgacacatggcaagagtaatttcaagctaagactttaaagcatccacagtgaaaaccatcctaagagtatccttagagagagagcgtgtgctatgtaggatgatgccacaagtcgaaatactactcttcttacgatgcatagtatattctctctcgagtacgcgacacaaccatcacctccaccctcggatgtgtcatccttgccgcaagtccctcctcctctatggccgtcgtagccctctcctttcgcatccctagtgaactcgagcgcaacggcaaaagggttcgacgctggaaggcggggatgccaccactgctgttgctcctacgcaggtgtgatgatgatgagaaggccacgaagaaagaggcaatggagagggagtaggtggtcttaatctcgagggcagtatgctagtggtggcgcacaaccaacaatggtagttgcaggtgtaggtcatcatgggaataggaggagttttcgagtgcctcgctgtcgccggatgccttagagcaccaacatcctaaaatcgatatgtgtcgttgtttcctgcttttctagcgggtccaccacatttcgatccaactccatctctaaatgtgtatcacatattgacatgtttagacatggacgggtatcatttggtatcagacctaatattatcctatccagacgggatattgcagtatatcagttagatattataatcttgtaaaaatactcactacgcactagtactacttttgctcaaatgcaacatttatctatatatctatattcttgacttgctaaaaatattgatgtcttactgtcccttagccctatagaaaaccttttaaaacacgaaccaatccagtgttctaggagtagtatttaccaaagcaatatccatcaatgtgctctgctatatggtttaaactcatattatctaaaataaataaataaaaactaggggtaaaaccttccacgcttgtaattgaatataccgtatacagacagccaacaaataatccagagccataatcacccatttcaccaacacagccatactacaagatttgagcagtcaattaagttggaggtccacattaaccctctggtaggccagtacaatagggggaccaaaagcatttactcgtgtactgtggaacagtacctcacactcgcacagcctactgcctccggattgggagctcgtaccgtacgtaccgacgtcgagcgattttactcttccgaccccgtgggcccgccctgacagtgaccgttgtttgttctccttgggagcttgggggcgacgacgaccgtgcctttggctgcctccgccccggctgagctggcgacctgacgtggacagcagcagtggctttagcccacacgcgtggccggcggtgagacgctgacacgtcggcagatagctttctgggcccaactgtcaattaatataaaagccaacctaataatccatttatacaattagttattggttgtagataaatattgcatcattaatatctaatctacctatctctcacatagattattaagcacatgctgcagctagttataaatctatagcccgtttttcttgcccccccccaccaataagtacgaatataacgtggcaacttgtacaacctatttgcatcatcttgttatacctgctcgtcaccttattgtaccggctctcacagacgtgtctccaacaaactaggattctcctgcttcacagtcacatgacccacaggccacagtcaccatgattataagattagagtaacctggtccgtatcaggagtactccatgataagagcatattgattgacacctacacttccccatgcctttttatcacaaagctttttcttcaaagttttattaaagtgtggctatgagtttgctagccacaaaatttaacaaataaatactccgtgctcagtgacagttctgagggtgatccaggtgatcccttgatcaccatcaattttggtcccgaaggactccctccttcaaatccagccaatttcactttatatgaaacggcggattcaaaaattttcatgagtctggacaagtctaacaacaaataaggtatacacaaacctataatagataactttagtatgaacatttgctttaaaagtttgtgttgagcgtgtttgctgctttactagttgcattgtactgccataccggtgagtaagaaagattattgctaaggtaattaggcactaatttactggtgaattgctgcatgtagctggtagagcccgggccattgcccgtgcaagccgggccttggctccgccactgtttatatgcatggcttaatgactatatatgttgtaatttttacaaagctcaaatgctaattttagtggatttgtaatattatgaggtactatatgctatatttgtatcatacttctaagtaaatacgttagagaattttgagcatggagtagaatcacccaacgagaaattcctaaagctgccactacgtccgtgatttatccccagaagttggatttctcaggaacggagagagtatgtctaagatcggtggagcagaagtgtgatcaaccacggttatgacaataaatcaaacacccaccaaacaaagtgtaacatgcttatattccctcaatttcatattataagtcattttgatttttttccacttttttaagtttgagaaaaatataataatatttccaacacaaaacaaatatattattaaaatatattcaatgttaaacttaatgaaactaattaggtgttgtagatatgttgctaagtttttctataaatttgatcaaacctaaagaagtttgactttaaaaaatcaaaacaacttataatatatgaaacaaagtaagtattccctccgtcccataatataaaggattttgagtttttatttgcaacgtttgactactcgttttattcaaattttttttgcaaatataaaaaatgaaaagttatacttaaagtaccatggatgataaagtaagtcataaataaaataaataataatttcaaattttttttaaataagacgaatggttaaacgttgcaaacaaaaacttaaaatattatattatgagacggatggagtaacatttagtgtgacaaaatgtggcacctccatgtgctcagctatggctgcagcgtggctttggtttataacgctgtctttcctatctggctgggccatacattcagcctgaaagcccgattgtgagcccacgtccgtgacagcctgtcagacgccgatcgaggctttgtgcatttcgctgttttgagtgggccagggaatcttggccgtccgttaatagattcctttctttcccagattgtgacctggcaccatccagatggattattcatcagtacataaatgtactaagatggaatgcacaagtgagcatatatgacagaataacacataccgataccatatagtaactatacaagtagtgccatatgcatcctatgtgtcggtcttgaacataagaaatgagacttctgtagattgtcactatgctctagtcagctactccctccgtcccaaaaaaaaaaaagacaaaccctggtttccgtgcccaatgtttgaccatccgtcttatttgaaaaaattataaaaaaaattaaaaagacaagtcatgcacaaagtattaatcatgttttatcatccaacaacaataaaaatacgaattataaaaaaatttcatataagacagacagtcaaagttggacacgtaaatccagggtttgtcttttttttttggaacggagggagtatcccgttgcttccagacatcaaatcaagcgatataacagtactgatatcgtagcatcaactcatgatttccttttacagcgccaacgtaatgcaaatattattcgagttgcgcgtacacaccttcaagattgctgcttatttcaatattactggcagtgcaaacaagttagtagccgaccagattagttccttctcttggaacattttgtcagtcaattacagataaatctacctatattgcacatggaattagaactgaagattcattatgcaaaagttgaaagaggcttaccagtaattcctatgttgatgatttattgaaactgatcgctgagtgcatttccaaatctttcggcccttccatatattttactggcaacaatacttgccacccaaaaaaatcagatcactcatcggttcaacaaccagcatcagaaattgtgccacacagtaactcagaagatccgtgacaaaatcgtcgaatcaaacttggcaacctctcttcagatcaataaaataataaagtagcgaagcctgccatagcggtatgggacttttggctcctacaaatctgtaaacactatctgtcgacctgatatagtacaggcacacacacaatctggattcaaatgctttgcgctcatatcagtcttcaaaaatctgataatcactgctctacaaagaaaaggaacacggtattattagctttatgatcttttggtgatatcctttttctattaagcttcaaactcaagttatctttcgagtacagcgctacagctttatcaaaagggatgtttctgctcagaaaatctgtacactacgcatggaaaaggaaatccaaggaatggtctagagaactcaaggaacatataacaaaacaaagccatttttttcaagaaatcacggaattcatcatttttcctgacggcctatcaatttagtgatacatttatgaatgctttctctgaacacctcagatatatgtcaatgtttgtttcccttgataacccaagcaattaactaaccttgccaagtacagcaagttgttttgtatagctcaaaaatcttcctttgccaagaaaaatagttcacatgggtaaatgtcaaagttatactctatggaccttatttgtggatatccagacacaatgttccaaaaaaaaaaacaaagaattgtcaacatatagcatcaagtcgttatatgtgcttccaccattatctagagttcttttattttcttagttcaggagctacggattctcatgtggtgccatacattattcagtgaacacactgaaggctagagaatttagtatcaattcagtaagtaaagttaaggttagtattgatcaggtggaatgcggaattttatatttgtacacttcggtcaaaagctttatgggaagcaacacatatagtcatgtactgagagtaacaaataaatagcaaagtcataataccaagaaccagttttgtaccttccagagagcaaatagagcgtgaactcattttgtgtgtgagagagtatgttggatgatccatttcacatcacttggtgcaccttgtgcttgaacagcacctaatgagatgccagtttgcacagctgatggggatttcgcttcgagtgatgaatgagacttgtgtggcatattattccctgtcaggtaattcctcagtcagcattgcataggtttgatgacttggtctgcagttcatacgctctaacatgataatcatttcacgggatatatctgagtgacctttttttatcaggccatcaataatcactttccacacaatctcatcgggactatagtctttccatctagaattcatgaatatttctttagccttatctgtttgtccttcacaaataagcccagaaagcagatgttggtaggacatcaactgtggtataaaaccatgttgaatcatagagcaaaccaacacccatgcatccaaataccttttggatttgcaaaaacaagtaacgagagcagtatagatgtcttcattcagagatatactatcttctttcataagagaaactaacgatgtcgcctcttccgttcttccatcttcagaaaacccctctagaatggaagaataagttcctgaattaggaagaaattcgttcttcttcattacatcaaacaacccaaagacatcagtaagctctatggctttccacacaccagctggggtcaaaggcaacacatcctccactaatctcatgcgtacaagatgtctaagcaagataaaataagtaaactggtttggcacagaagcaacacttgtcatttgtttcaagattgagactgcatgatctgtctgtccaatacttgcatgtccatccatcagagtattgtatgccattgtatctacagtgaccccatttttgctcatctccatcaaaacattttctgcttcatttagtcttccttcaatgcagtaagcacgcatagacgttgtataagtgactacatcaggattgcaacctgatgaaaccatttcgccccaggttctcgcaaccaatccatagtttctctcctttaaaagcttatgaatcacaattgtataattgactgttgagggcttcacatccttttgtagcatctcccctataaaggacagaccttcttgtgaccccttcatcttgcataggtgttcaataaatgaactgtatgtgtaagtatcgggtgtgcaacctgcagaaaccatcttttccaaaaatttccatgcaatatcagctttaccagacttgcataacccatttatcaaggaattgaatgtcacggcattaggttttatgcctctagtttctagactatcaaaaagggagcaagcttgatcagttcttccatccttgcagagagcattgatcaacgcattatatgtgtactgatcagcaattaaaccatctccttccatcaaacgtagcaatcggaaagcactctctatatgtccatcaatgcattggccccgaatcaacaaattatatgtcacagcatctgggttgactccacatgctctcatcttgttcaacaaagtcatcgccttgtgcacctttccttcattacagaacccttggaccaatgcattatatgtccacacatttggcttgcaccccctcaacttcatcaactccaacaccctcaatgcatcgctcatccttccctccttacaatatgcatttatcaccgcagtgcatgtcacaacacacggtgccaatcccttttcaaacatctcctgaagcatttcctcagcctccttggccttacgctccctacaccggaaatcaaccacagctgcataagcacgggtgcttggccgccaccccaattccttcatcctacgcagcatgagaagcccctcctccccccgctccgcattacacaaccccttcactaaggctgcatacatgtgcatgtctggctggtccatctccccgaacaactccactgcctcgtcaatcctccccgcctcacaaagcccctcaatcagcgtggcgtaagagaccacgtcctgggcgaaccctctcaggggcattttgtcgaacaggtcgcgggcaacgtcgacctggttggtgcggcaatacccgacgatgagggagttgaacgtgtaggcgtcggggcgccagccggagcggaccatgaggctgaggtaccgcagggcgcgggcgaggtcggcgcggcggcagagggagcggatgacggcgttgtaggtgggggctgtcggcgccggcggggcgtggcggtgcatgtgggcgaagaggcggagggcgagcggcgcgagggcgaagcgggagaggtgggcgaggagggaggcgaaggggcggtcgaagagcgggcggagcggcgggggcgagagggagtggaggcggaggacgaccgggagcgcgacggcgaggaggtggcgggacggcgcggccaccctggccgccgcggcggcgaggcggacggggagcgggacggggagcgactccggcagggacggcgtgagcagggcagggaggcggggcagggaagggttgaggaaccagtcgggcgaggtgaggacggcggcgaggtgggcgaggagcgccgccgggttggtggagcgcggcaaggctggagacgagcccatgggagacgttcctgggtacgcgcgagccgggggacgcggcggcggcggtggcgtcgcccgcatgttggcaatcggcggcgagctcactgcgccgccgccattgctgggggatctcggctctgctcctttgccaggagccgggttgacggcttgacgctgcccctgcttcgagatttgcgcaaggaacaccaccaacggaagcgattttcagattccaatttcgggagcaactattttctgccgagattcatataaaaatgtgtcacattcctttgtagatttatttttaaaaaatggatagagttttgattttaaacctggtataaattaatgtattacatgaagcaacgatgtaaagtactgtatgaattacgaatggaggttctataaaaaaaaaatatgtagcgcaaacttcatatgtattacaaatatagaaactatcgtaggacaaagaaatgagcacttgacatttgcccaatccatttctatatcctacgtatttcaagtttacgctacattttatgtgaagtgagcataactcaatcggttatttttcttgtggtgaaaccaacccacatggtacttgcatttatagctaattattctttcagtagtatgcgatgtacctatctgtgtgtatacgctcatagaggtgagtgcacgcgcgttacggaaaatactttgggatctagaaatggacacctaagatttagctacgtcaccaataattgtttcctcggttgtgtttgagacgagaggaaaaaaagaatatggagaatatatgtaaaacgacgtgagttattaacacatgattaattgagtattacttcctccttttcacaatataagtcattctagcatttctcacattcatattgatgttaatgaatctagatagaatgtgggaaatgctagaatgacttccattctgaaacggagggagtaactcatttaaatttttttaaaaagtaatatgatcatttaaagcaacttttctatataattttttttaaagaacaccctgtttaataggtaagaaagcgtgggcacggataacgatataattcttctctcaatccgtactctctcctcttattacggcagacgatccggatccctctttcttgcttgtttctgacaagtggaccaataaaattatttattcgtcagaaccggttgcttcttctgaaatgtctttttcttagagcctcgtgttagtttctctactactatctccgtaccaaaataagtgcagctattagtttccacgctcaactttgatcgtccgtcttatttaaaatttttttataattagcatttttgttgttatgagataataaaatataaatagtattttactcgtgacttatgtttttaatttttttttaaaaaattttaaataaaacgaatgatcaaagtacaatatttaggacggagggagtacaatatttgagactggttttatgttcattctctctctagtaccaatccaaagcatacaaatgcagaaaaaaaaaaggcgctcttccagtttgcatggatgttctgtgatagacagaatgaatattgtgatatcaatggttaaatctagtttcagttaataagtacattcgagattctagtcccagtattttcccttgatcaaatattcctcaaacactaacagcccatagtaacgatctaatcgtccatattcatgatgctctggcacatttcaggaaccaataggacatcagaatcgatctcttacgaaggcacacatgaaataccttttcctcttgcattctactagtagttacctttaaatgtccaaatgtaatgataacagtgatatctgcaccgaatcatcaaccaaacaagtgatgacaaacttctgtagtactaattccagtcattacacgctcaagtcaaacaaccaacccttgggaaaattaggattgccagaagaccagattgaccagtccagcggtttcttctataattttataggagctttgctctagagtggcagcaaggaatgagaagcagttgatcaagatggaagtaaacagaagcaaacagagcgtcatattacacaccctttgacagaataaatccagcattccggtacaccgtactagtccaacatgtaaggcctacaaaactaaattcagagggtgctggcatgccagaattctgtcactggtacagttcgcgccatggttcctgaaagacgggtgatttttcgatccccctctgaagaacggtttctttgctgaattccaagttgatgtgcttagccaagtgatcacctacacactgcagcacctgaagcacaacaggtaggggtcggggtgagccaacaaatgcaagtataaaaactgcagatatattttgaagatagtggcaacaggtacagagaagttgaagttcctgggtgggagtgtggggcagacaaaattacgcaagaatccttatataattaccaaaagactagctccttgcctccttcacagaatcacagttgctcgaaactaaaaaactatttccttttcctacataatttttactgtcatgtatattgcttaatattgcagacttacatcatgaaatggaagtgctgaaagttcagatctctaaccattataatattatttccgacatcatgatgatatacatacaattatttggaaacatcatggtttctggatttctatttggaaagaagaggacatagagcacattttcctattactggacacatattttatagttcaacttcaatcttggttctaacataatattttcaagataccaagtctacaggttaaccttttctcatttactatattaccataaaattgacttcaagcttagccattaaaactgtagtagtttcctattctgcacttatcttcatttagaacaagagaaagaagaaataaactgcaaagcaaaattcaattggaactcagcagtcagtgagtatgtacctcaaggtccacatctgtagagctttttccttggtgctgcccaccggatgcaaaaagaataactgtcggtatattcaacacacgtaccatttccagcaaacagagtattggctcacttcgcacttgtaaagattgaggaagtttagtagttccgtcaactaacatctgagtaaactcagttgttgctcctatttcagcaccatggagtgtagctaactgtcctgtttttgctccatgataatagtttggcgatcttgtcataaatgggacaatgagggttggctgagtggatggagcttccgaagaaaccaatgctaaaatctcattcatagcacatgctgcaacaggaggcttatagtctggtaggacaaaaaaggacacctggcaaaagttaacagaaattaaatatatcagaaagaaatgaacactcccaagtaataataaaaagaaataggtaaaaaactatatatagttggtcagccagtcattcagtatctattggtcatcaaagaactgcagaactgtataaagtgacattgaaagagagagtgcatgacaacagttctacgaccttacaattgcataatgtgaaaactgcaaaagctatcaggtgccagctgactagcagttaaccataagacatgaaaattaacctttcctaacagggcaaagcaacatgaaatcaatagatctagggcacaaggtaaacctgcccatctgaaaaaattatgacaaccagtaaatcacaaaaaagtagccttttgcactggattgcctcaggttgttccaccataatatgaggtaccatttaatcaactgtaaaatatgtaatttttgcgctgaccaaatgcaacaagataatttagagcgctacatccataaccatgaaaacagaagtgtctattctatgtttgctagacaggaagtacaaagatcttcaccgacagaaataagcccagtatacatgaacgcatgcttatataagtcagttcaaaatgaagggtaataggctcgcagcaatcaaaagagtgacaactgacaaatacaactcaggcttcatatatcaagtgctcaaactgaatcatgatgaattgatgataatcagttccaaaaactcagatacaacacatatgttcatactgaaaccatcagttctctcttcctcggcaacaaagttttctgtgcctccaaaacacactcgccagtaagttgattggtgcataccacatcaaaccccaagacgcaagatttactaagtgactaaaccatatcgtaagagtaagttatagtattcacgcatttcagtaaaattgcgacatataggccgttttggtttgaagcctaccaaagttgttgtagggcaagaattggcatcaaacaaaacaacccatagattagcattatagatcggcaaattttggttccaatccaaatggccacatagtaccaattgaagctaccatttataactggtagggcaagaatcggcatcaaacaaaacaaccctatatctttcggttcactgacattgctccaaaacttctaactataataatcataaaaccaaacgaaaatatcctagtatgcagccaaacagaggctaatctgccagctcaacacagtacatttgtgcacgataactaatttccccctacaattgcttattccaggaaccgtgtggttcattcccccaaaagaaaatgctttccatttagctcaagcagctaattgttgatccaaaaccttcacaccacgcgaattggatctatcagacggggccaaaagccaaaaagggacgcttacctgcggatcgccactagaatcggagaagttcacgagctcgccggaggccttctccccgtcgaggccgtacttggcgagggggagctccaggggcgtggattccctgcaaaagcatccagcgacgacgggtcagctaccgtaaggcgctggattttggtccttttgtggagagagagagagagagagagagagagagagagagaggctagggttttagaggggggacctcgtgagccccggcgttgggcggagcgcgtcggcgagggcggcgccgtagccggcggcgtcgcggacgaggacgaggaccttgggtgccacccgcatggccgccggtcgccggtcgccgccgccgccgccgcgaatgatcggagggagagaggagaggggagggaattagcggttgagcacgcgaagagccagagatagagggtagaacggtaataacgagggaattcgttagaagtttagaagtccatccaattatttgtagtctcttcaaatttgaattcgtagtagtatttggtatccgtgtctgaaaaaaattcagattcttgattgttttttattcatcttatattttacagcatataaaagtttcttggatttgttcacgtcaccgtgaacaaaattggttatgaaacgtatgaatttagggccctttgaatcgcaggattgagaaaacgtatgaataggaaaaacgtaggattttgatagaaatgtaagtgtaaaatagaggattgcaaaacgcaggaaaaacacaggaatgaccgtttgattaaaccacatgaaaaatacaggaattggatgagagatagactcaaaggaaagttagcaagaggttgaagctcttgctaaattttctccaaaatctctataggattgtccattccataggaatttcaaagtattggataggattcaattctttgtttcaaagggcttcataagaaattttcctaaaatcctataggaaatttctatatttttcctccaaaacaaagaggcccttaggtttttatgattggagtataaaagttactcccatgaaagatacgcttatggcagtatatataataagttgtgttactgtgatgagcacagcaatatgcaaatagttcaatttgaaaatgaaaatgtaacaacagaggaagagatcatgctcatcaaacattaagatcaaacggttgtattattggctttgaatgtaatcacgaccatcctcaaaatttgcttctcttaacacctaactagcatggtggcccgcgcagattgcgcggctagcatcattatatttttctcatataatagcatatatgttttctcattatattattcaaatatattaaaataacatcataattttaaatttttcaataactttacgaaactacaaatgtgtaatattcatattgtattttacatatgtgttagttattaattatttttaatatcaaattttagttatttgtaaattatatatattcctatatggactctagactcatcttttaatatatttttttaattccgaattttctgtaaattgtatttctatatagactctaggctcttcttccaatattatttatttttatttctgaatttttattatttctaattgtatttctatgtggactctaaactcatctttcaatattctttaatttttaatttcgaatttcagttacttctaattatattcctatattgactttaaactcttcttcccatgtttttcttaatttcgaattttagttatttgtaaattgtatttttatacggactaaaactctacttttaattttattatgtttattccgaattttacttagttttaaattcctatatggactctatactctatttctaatattcattattttttaattccgaatttctatatttttcttaattgtatttatatatggactctatactctacttctaatattccttatttttaattccgaatttcagttatttcctaattgtatttctatatggagtctagtctcctcttctaatattccttattttttaattccgaatttcaactatttctaaattgtatttctatatggactctagtctcctcttctaatattccttatttttcaattccgaatttcagctatttctaaattgtatttctatatggactctgctttttctttttctccgattaatgtgacaatttctaggccatgagagcgaacgtggaggctcatttttctattcctttaataatataatagattgaaacatagggtttatattggcttcctaattagtgaggataagttactattggttgaatttagcgaatagtcgggggcgtggagtcatgggcgaatgacttcattcgtcggagtttaaattctggtacccacaaatattacgtttatgcagataggtttctaacgagattgtagtgagattatggatgtactactgagtatcatcttacgtgtgcagtgatgtgtctgcgtgtgtgtatgtcgtgtaattgtaaaagaagcccatacccaggcatagtcttttgatgctcttcttgaggtggaaaaactggttttggcattcactggttggagacagtgaaagcatcaaacattggattggatgtccaaaaacattggatatattggatgtcctagtcttgaagatgtgtacaggagaatggtacatatacactaaggtgaaaattttgtactgattggattttgatgacgattgtacaagttgtaccctttctttgaaagcgttattgtaggaatgaagcttgaaatatctcctcgctaaaaaaactattgcaattttgtggttggtcggcctatggtttcaatgacaggttcagattttttttttccatttcagaccagtcttagcattgataagtttttatcatgttgttctttcttcttagtcgttttaggtctcaattaacatttagctaatgtagtggtaatgtgcatccttaagttgacgtcggatgcagataccagggatttatacctttcttatttaaaaatgaaaactctcatattttctagagaaaggacaaactactgttctgttttttttacttgaataattcttcattgaaaatacttacgaacaagttcaacagttgcaagtattccaacaatcatgttggttgtccaagtttgttctagagggaatatatcaaggagattcgagtatgtcgtctccccctaatctactgttgtcatttcgtgacatgagcatgcatgatcggtacagctagctatcctatttgtcaacaaaataaacccaatttcccggtggtccatctcaccatgttgaaaaatgaacgtgtgaaaccgtcctaataacctaagcgtttaattgactcttggagcaaacatacaacaatccttgacttgacttcattcacggaacggcagttgtcccttggccactgatcgctgagcctaaataaggatttaaaagttatctcgttttataaaccaaaatggtagtgtataagttgagaaaagtccattagccagtacaccggaatgcggcttggtttatgataaaagtaaatcgaagaaacgtaaagagcctttcccacccaaaagctattcaacgaggtgagggaccaatcaaggataacctatatattataatctaattaagcaataggatactattttctatctcactctcaagtactagtactacttcaccgcatcatctgtactactctatcttatcctcttcgttcatagccattcaccgcatcatctgtactactctatctcatcttttcccccaatcttctagaggcatcgagagcagcaaaccgatggtgagcttggtggatggcgtagcgagctcgcgtgcgtggccgagctaggtaccggccgaagcaagcaaggcgacagtcggccgacgagctcgcgtgcgcggccgagctgggtaccgggcgaagcaagcgaggcggagcaattgaagcgggcgcacggtaggagcgagctgccaccatggtcagcacaagctcgagctgcgtggtttgcgactttgccccaccacgccgccgtcgactccgccacatagcgccgcccatgagctccctccggcttgagctcgaggggaacaggagagaggggggagaggggtggaaggggaatatggaggtggagcacccgtcgccgcaacgcgtgcctcgagcccgtcccctggccgaaaaggaggaggagccgcgtcgcccaggcaggagtcgcgtggcgtcgctgggggacggtgcgaacgaaaaaagcaaatggagatggacggaaggagctagggacacgcccctgaggctacccgttgctgatggaaaattcatgtgttgaatatattcgtgtattttgaatgcttcatgtcttcaaattccttagtttgaagagaggggtagaagaggaaaacaacacttgtggctttataggttgggattttgaggagcccatccaggggtgttctccattgcgagctgagttcccctacgagtgtcctcagttagtgaggacactctaggaatggcttacattgtggatgcccttatatattaggtctactttcacacattggtgtacctcaaccctttactgcccctttcccaccccaaaagctgaccaatgaggtaacgtgagatccacggtccatcaggccttcacacgtacctcagccctttaccaccccttcaccagatgttgaactaaccaggctctgatacaaattgtatgatcgtgaagggtattttccaccccaaaagctagccaatgaggtgagggggtcccccacttatatattaggccacttgcctttccacaaccaacgtgagattattcaacagatatgtactccatctgtttcaggttataaaaaattttgactttaatcaaagtcaaacggttttaagtttgactaagtttatagacaaatatagtaatatttataatactaaattagtttcatcaaatctacaattgaatatatttttataataaatttatcttggattaaaaatattattacttttttctataaacatggacaaacttaaatcagtttgactttgaccaaagtcaaaacgtcttataatctgaaacagagggagaataatttagtaaataaacttgtaaaattttcatttcaatttataaatttgcgtagtgcgtgtaaataatctgctaaatttgagatgaagcttacaatcacccaatagtttaactagggtggtttttgttttgtgctaccttactactgacaattaacatttgacaaatctccatttggaaatcagaaacggagcctagaaagctgatcgggactcaactcaaactaaaaagtgaaagtgctgaaagaatttgaagtccagccaagaagcaatgccggttaactatcccttttgcgtctggcatcagctcaaggaattaaaatagttcagaaacgggggcgcgacgatgacgatcggttgctatgtttaatcgatgtcgagtgagtgctgattggattctcgggatgcttcaatatctatcttctctgactctctgtactgatggtgacttgctacaggaattttttttttgtttaatcttctgaagctgcaatttggtttccatcaactaatccaaacaattaacggtgtgcgtatctagcaagttagcttctacttctacagttctctattccttgatctttatcagttattcaatttactgtcttttgcagttccctgttcctttgatcgtttactactcttctgtagtctctaaccgagatgaattgtaaatctgggagtagttttgcatcacaatctttaatagtacaagacaaagctaccactcttctgtaataggagaggtgttgttcttgcaagaacttcagataatctctgaagaaatccaagcagtaacagagttttacaggtacagtttttacgatatacagttttattattatacatggttaattcactaggttgtgcagcaaaagctgccaaattaattaaccgcaaaagaaagcagcaaaaggttaacgaccttcaaaaatggaaaagaacaaggcaagaaagcaacaagcaaaatcacacatatgtacatgcatgcacatatataggtaattttatggatcgagattaatttggtgctagagaatgcagcaggcgttgctgtcgctctcgtggtggcggcgggagcgggacaccgccttgaaggtcttgccgccggcggctgcggcggcggcgcggccggtgccggcgccggtggtggtggtggtggtggtggtcttcttcttggtggtggtggagtggttcatggggtggtagtcgtgcttctccaccagcggcgagtagatggccgggtggctgagcgccaccgcgcgggagtagctgctgccgccgtagccgtagccgccgccgccggcggccatcgccatcggcgacgggtggtactggtacgggtacgcgtacgggctgggcgccatggcgtacggcggctgccactgctgctgctggtggtacgggccgtacggcgacggctggtagtggtacggcgacgcccgcgtcgtcgccatcgccctggcggcggcggcgtccttgctccccggcgccggcggcggcatgatcatcccgcccgggaacatcgccgccgccgcctcgaacgtgtcgacggtcctcagctcgacgatctcaccggagcccaccttcctcttgagcttcttggtcagcttgttcgtgtccacgccctcgccgatcaccagcagcaggttccggtcgccgccggccagcgtcaccgactgcacccctgcagctcgaccggaatcaaatcaaccatgaaatcaacaagaacacaaccacgatttcgcattcaaaacaagatcaaaacaaagatgattaccgctgacagtagcagcctctttcatggccttcttctggcatttgtcggttttcacggaaatcctgataatgatctccttctgaaattttcaacgcatggatttcacagataagttcttcagacatggattaactaaaatctcgcctgtgtctcggacaaaaagtttcaagcagaccaaagcaaaatatgtacgtagaagaaactttcagaggaaacaccaattaaactctgcaaataaacctccataaaacacgcaccaattcgtggtgcaactcgtagaaattaaaacacaccaaattcgaactcaaacttgcagaaacacgggaatcatgagagaaaaggaaccatgttaattaccttcatggttttcgcttcgctaactgaatttgctcagtaaaaaaaaaaagtttgctagctatagctccaatggaggagagggctaaggagattagcaaccgtgtgttgcgtgcttcactctcttaagtactgacaggataatggcctgtgagctactgtggttagctcagtggtttgtacctgccatgtgtgacaataccataatatcttgtttatttgacaataccataatatcttgtttatttggtactagtacttggtagccaagcgaaagaaacacactgattagatagaccttgagagaaatgcatatttaactgttgactttgacctagagactttggctcggctttgtgtgtagttatctcgaaggggaggattattatacagggcatgtctcactgttgggcccccaaaacaatccatatggattttgtttatgcataaacaaaaggcccatccactcacaaatatcatacgagatatatcagccaaacatgccaggatctccttgctgacgggagcagacgtccaccaccacgtgcctttacttgaatttcgtcgtcgtcgtagtagtattgttttggtcacgtgtaattattttagtaaaaaataattcatgttggtcgataacttttccatgtaccataaaaatataccctattcgttttttttaaaaaaaaacctaaatgaagatttaacaccatctaaaacaataaatctggattcagattcgttgtccttcccacctaagttaatctttttcgagatgaagggagtagtagacaagtaactttaacagttgttgcatccaaatgcaactcaaaatctttaacacccacggttcaaaagctgttttcagtagacgatatcattgattatttttagcataacatttgaccatctgtcctatttaaaaattatataaaaattatatatttattatgacttgttctattattaaacacacttttaaatatgacttatattttagtatatttacacgaaatttttaaataagacaagcgatcaaacgctattttaaaagccaacagctttatttattaaaaaaaatgaaggtagtataagtttaaaatggatgaacatatacacacacactagaaagtggattgactaaatgtggttcttttccgcgcacgtttccactagctagcttctgcatgcacggcggagttaaaaagcatttgtagtagacctatagtcaagcagttgcaataaacaaaaaaaagaagaagaagatcatctacccgagatcgatctgatctgtctaagaaaattgatggcatggttatcttgcttgcgctctgtgtatcaaaacaaaatatttcacgtgcccgacgtgccaatatatagcctagcttactgtcgcaagttagttgtggagcaattccgagtgttgcacgcacggaggacatacccgatcgagatcggtctggggtatggcaaattaaacgaactgacaaaaaggagattagataatttgataccgacacatatagtttcagcaaatacatgtatcgaattaaagccgatggatatatatctacatgcatgatcatttaatttgcatggttcgtcggcgtcacatcatctatcgtcgattgttatccctcgctacacttgtagagatcggtgatagttatatttcatcttggcacaatgactaagaataagtaattttacttatcatttatttaaatatgctactagttatttctcataaataagtgattcattaatatttacatttctcgatgtccatataactaatcttgtgtagaagaatagagagtcatgcattaaatccgagaaagtcattaagataataggtggttggattgaaatatgcttatcaaaagtaaatttttcagatttgaaaatatgtctataaaaaaagatagagagagtactgaacagtacatacacatgtacgtacatggtccggcctaagagcatctccaacagcctccttattcaactctccaagttaaattttagcaattttaaagcaaatcatgctccaacagactagctaaccggatggctaagccatccggctagccaaactactcctcccgctggccaaatttggccagccaaaataacctagccaaattgtgggtcccatctcttttcccccttctctctctcgtcagatgagcgtcggcgccgcgccttcgccgcttcgcgccgctgcccgtccgccggctccgccccaccgcccctccgctggcggcgcccctccgcgccacccttccacgcgccgcccctacgccgccgtcgcccctccgcgccactgtccctccgcgccgcccctccacagcgccgcccctccacggcgctgccctctgctttgccgacgccgtccctctgccatcgtcgtcctttgccggcgccgcgccctccgtgcgacgatgagaaggaaggaaagagaaaaagaaaaagaaggaaggaagagagagagagaggggggggggaagaagaggagtagagactgacatgtgggtcctttgttattttggagaggatcagtagagagtctgttggagtgatcatctaatttaactagccaaattagatagagagttggctatatgagtttttggagaggttaatttgaagaggctattggagatgctctaagctagctcgctcgctctctatcggcgccaccgcccactgcttccaggagcaaatcgcgatgtaccaaacaactaatactaccagagtagggatcgatcggctcattaaccagctgtggccaagaactattgcatgaaaccggccaaattaaacgtcgtcgacggatcagcgagaaagatatgataaaatcaatcatatatggcgagaaactgaagcaccgagctcaagttcctggcaattcgtgccacgcgcaacgcaacgtgcgtactgtaccttctcgatcgtacgtatacgtgtcgtagctgctgctgctgctgctaggactagattgcttggacagggattcgaccacgtacaggatcgtaggcgcgagtcgcgcgcgcgcgcgacactagctactttgggtacgcatcgtatgccacatgggctagctaggaaaactgccgctgagatcgcgaaacgtacgtacgtgctaaactcggtggccgatcgtgatatatacgtgggcgcgcgcgcggtagctgatccacatgtacaccggtggcgacgggcgaaaattaaaacccgcggactcatgtccaagtcgtcgtactcgtttttatacgtcgtcgatcgggggcggtcggcgaggcgcagtggcgcgcgcgtcacggaaaacacgtcctccgatcccgtctccgatgacgcaacatgttaattagcagctagggggcggagaaaaggatcgcgcgcgtgcgaccaaactaattaactgcacgggtatgtccatgtgcaacttgcgcaagtatgttggttaacttaaccgtgctcgcgacgttgcttaatctggccgggtggggttgccatcgagtcatcgacgacgcatcgttgtacagacgggaaattaccgtttcgatccttggaatgctttcccgaccaaaagctagctatactccatcgaacattagacacggaaacttatggttgtacttaaaatgggatgagggagtaggatatatctcagtatcacgaatctgaataaataaatgttcagattcatgatattagcatatgtcacatcgatttatagtactgaaatatatcacatcacgtactatattaactgcctaacaatgaaatttgattgtaaatatctcttacacaattttgctcaaagttatagaaccatactcatggtctagtatttttgaacatgaatacaataatattttttttgaaaaacctaaatattatttaattaatagttggtcaagctcaaaattaaactgttaacatacgacttagtatatttctaagagttaattatactttgtaccatattttattaacaaagttttaatttggatcactcacacctcaataaactccctcatccatgccccagccatatttttgcctaaggatttgatagatatggcttgaaaagagagttaaggtggactaaagtataacaaatataaaattatttggtacaaagtgagaagatagatcaaatgaggatcgaaaacaaaatttttgataataaagtgtggtccaaagtaaaaaaaatccgctctatttctaaacaacatatttaatgatagatactctatccaacacgggaaactgtgtagtgtaaactaaaaagctatcataggatgcacaaatagatatatgtgatttgtccatattattttgagtaaattttttactctccatcttaggtgtgtacattcatgtatctgatgatatatagttttcatgtttgtactgtacatgaagtttatactggacactatatatttttccgttcaatacttattaaagatgctctgtgtaatactgcagaggtttaattaaatacataagccatatttttcttccattttgttgacaaatgtcaattttctcacttggattgcgcaagaccttttatctgtgctctgccttctcccaatattgtggagcctggcagaaaggcaactcaatacagcgatggctaagactgatctcccatccaccctctgtcgttgtctctgtgtctaacacatcaaatcatccaattatctacgtttggtgtgactatgaatcacccgaactcttgacaattgtcattagccccagaagacaaatgtgcaatacaagagatgataatttaccgataacacgacttgttctgttgcttaatttgtatatctaggtgactactgactagcttccacgttacgttatgtgaaaacaattcacacaaatatggtgtactagtgtgttctgcagtgtaaaggatcgattcctacttcccgaaaggaaaaaagattcagccaatcaatgtcggtcgatgtgcatctctgaaaattcattcatcatttctgcatttcacactgatttatcttggcagatctgaaaacaacacagctgcaaattaacaattaattacaatcaaatggaacgatcgaaggggctgacaaaaaccatagcccctctatctcgaccgatcacggcttcacacaaatctgtttacatgcagagatgaacaaacaaatcaactgaagcacaaatttccccagttatttagcagcctcaccagcaaatagtagtagtaaacactgctcaaacctcaccgaaatgaaatgagaagaagaaatcatagaaaaaaaaaatagaaacagctatacacaatagctaagcttaaactatagtcgttgctacatgatggagcagccgttgggatcgtcgttgctgctcgtcgtgtagtactcgtgctgcaccgcggcggcgccgtacggcgacgggtagtagccgccgtcgtacggatgctgcggcgcctggtggtagtacggcgagtcgtagccgccgccgtacagctggtggccgccggagctgtaggcgccgccgcgcccggcggagagctgggaggagtagtagtaaccgccgttgctgctgccgaggcggccgctcgttgaggtggcggcgtagctgccggcggcggcgccacgtgggtaggtgtcgtgcagggtgcggagctcgacgatgtcggcgtggccgaccttccggcggaggcggctggtgaggtggttggagtcgacgccggagccgaccacccgcagcaggttccgaccttccccggccagcgtcacggactcgacgccgtccatcgccgccgccaccttcatggccttggcgttcccattcttctccgagctcgcctgcatcctgataagcatctccgtctgcaagaagaacacagcaacatatatccattagaaaaaaaagaaaagaaaattcaattcatcttcatatatcgtcactaagaccaatcaatcaatctgaattctgaagagagagcaaatttaccctcatggcgccgtacaattttgcaacagatcgagcaagctagcgttcgatctgaagagagagcagaattgatcgaattggtttgtgtcagagcagagcagattagcagatatagcgtgatgtcgcgggcttttatactgagattatgcgtgcacacagatgctactaccggtttcagggcaattccaattcaccttgcggttgcggcgttgggtggcacatctttttcaagagattcttttaatttgcgacgaagcagcggggatccgaaccaattatcaacgaacacggcgggagccgaaaattttttatggacggttgactgcgaggaagactccaagtaatttaatggatgttacgtgggtacgtgtcgcttgtactccatttgattggtgcagagcgatcgatctcggccgttggatgcaggacagtcggtgtatcggacggtccgatcggggtgtacaaaaatgggttacaaggttcgggtttttggtgagctgaaagtgataagctcgagtgcaggtgagaaaaatgataactcaaatgattatcggctcaaaaaaaaaaaatcatccagtggaggttggagttaggagttgacaattattattttttggtcaatccaacttcatcagactatcaacgattcatgcatgcatgtatcttcaatctcttccatttcgttctcttttttttttttcaaaaacaaacattaatttctttcgttctctagtttgtttttccctacttagaaacaagttgagttttgttaattaacccgtgcgtgatgcacaatcggatgtttccgtgatgcagcgcaagctgccgcctgcaaaaccccgagttaattttctgttggctgaacaccgttcttggttttgcgattcagtttgtaagttcgtaacaattgatcgtactatttttgtgaatgttgtttatatcttcacagaattgggctacatcgactttatcaaagatgcggagagagcaaaacagtgtagcactcagctgcagaatttattttaagaaataatacgattttaagtaaaatcacaaaaatataggtcggttagacgaaaatcacaaaaatataggtcggttgttcgacagggtatctatcttcgacatggtacttgtcgaggtgataaaaaaattttaaaaaagagaattatcactgtagtggcactgttcatcaaacatatcgaacatgggtagttcgacatgcccctaccaatcactgtagcgtcactgtttatgtactttttttattttttattttgaccaactaccctattgaactgttgcagtttgataggtccccgtcaaaccacggttgtttgacagggtgctaaacttacgattttgcctaaccgatctatatttttgcgatttcccattctaaaaaaaaaattcctcagctggattagcggtttggttaaatagttaatttgggtgatattccaccggccattaattgaatctttaattcttggtgaacgaaagcatctttaattgagtaagaaagctctcactttctccgtaaagaaaatgagaagagaattgaaccaggaaatgtctcccgaataaaacaaaatttcccaggaataatcaaccgtcttttgtgattctgctactttaacacgtgttcggtgggactttctcttccttgaagagaataaacagaacccaatatgatgtaagatttcacttttaacacatgctttgcctttcggatgttccttaggaaataagtataatggttcagaagggaggaaaagaacgaaatttctatttcagaaacttcacaaagaagaataaatcattactgggctagtgcccatggatttgatcatttggcccattatttctttcaagaggtgatttggcccattaatgatcacttcttgcgagaacggcccaatatagaaccatatgaagatcatggcccagtttccagagaaatacaccttgggttgccttttaacactttccatttcttcttcttcttcttctcctcggcgaaaggtgttcggactgaaggtaacaaactaacaacggtgtttttattttcttttcagaccttcaccatgaaaattacttcttaagtatctcatgataaattctctctaatgaaaacctataaacgaaaagtcattttacaactacacctatagctttattttgaacggcagatctatattattcacgttcaaacatacacgcacatcatattattattattatattatatcatgttacactcacgcacaacttatgttattacaatattataagccatcgactggcgcatagtacatgtagcctttggaaagagctcacactcatggcctagcaagccgtacacgtacgtacaaacgcacgtcggcaccgcgtacacacgctgacacgcgtgccttaatttattgatgacgacgaagagtgcaataagcaatactacgatcgagcttgtgttgcgtatacagtcgtatacacacatagtacggcgtacggcgatatcgacgtatatacggcgggccgggctacttggagcagcacttgtggcagtcgccggaccagtcgtcgcagcaggatttgtcgtcgtatccgtcgcagtagtgcttgcagtcgccgccggaccagtcgcagcaccccttgcctttgcagacgtcctccttccccggagacgacggcggcggcggttcgtcctcgtggtccggcggcgacggcgacgggtcctcgtggtccggcggcgatggcgacgggtcgtgatcgccgccgtcgtgatcgtcatctgcatgcatatagacgacatatcaaatactaattaatactaaatgaatactatgaagaaggcatgcatgaacacaatacatgtagtagtatatcgtatcgtagtccctccgtttcataatgtaagtcattctagtatttttaatatccatattaatattattgttaatgaatctaaatagatatatatgtctagattcattaatatcaatataaatgtaacaaatactagaataatttatataaatgtgagaaatactagaataatttatattgtgaaacggaggaagcagtatatatgtgtatgtgcaggagaaaatttaacgaaaaattgtatgtatatatatgcatgcagggtgtgtgctagctagctagctagctcacgtacgtgtttcttcggcggaggcgacgtggatgaaagcagcggcggcgagcaggagagtgaacaccagtaaagccaacttggacgatgccgccatggctgctagctttaagaccttaagtgatcttaattaattttcaactcacggtataattaattaggactggatcgcacaatctcgagtgtggtgagaagcctatgcgtgcaaaccaagcgtatttataggcaggatgaagccttcttatgagatttagggttctggtagtagtgcgttagttactagttgatgacacactgcgtcttctcatgtcgaccgattcaaggttatacgtatagcagaacatatataattaagctgactagcgaccagctataagagcatccacaatagtaaagtaaggtgctctctataaaacatgtatatttcagcaatagactcgattaatagtaaaccaccttaatagtatgtctatattggtatctatatctctctcattcattgcctcgtttttctctatagactatctttaagttagtagatagctttgctctctctctctcttcatttaatacctttcaagtaggaaaatatgctgacatggatctcttgtagagagcctatagataaccattgtgggtgccctaaccgttttgccattctgattaccgcattaatccccggttgccgattactccctccgttccattgttccattttaattaattgcagttataaatttttatgtctaacatttgatcgcttgtcttattaaacttttttataattagtattttaattgttattagatgataaaatataaatagtactttatgctcaacttatttttaattttttttaataaaatttttaaataagacggatggttaaatgttgggtgcggaaaatcagaaccacacgagaaatgagtgggaggagtacattattcataaaaggtcaactttacgatggcccggccaccaatgtcaacaactaatcacgccataggcatgcccatttgcatcaaatatatatgtcatatgaaagcaaaattcgtggaaaccccaagcccacatgtctgtttagaatattttagcttttcaaaccaaacaccaccagtacaagtgtgagtgtgtgacgccataggagaagggcgattttatttgggcgcgcgtaggattaatttcattcgccgatccgttaggtgagctcggaaaatgcgagcacgccggcgctggtcgtcggtcggctcgccgcgagctacgatgattgggtcgtcgatcggtcgtccaggacggggtcctgcaaccgaggaggccatcggatggcttaatggggataagtcaaatgtcacatttacgaatgaaaaataatttgcaaaaaaatttttatatacgtgttattagtgatctaaaagcaaatgctgaaaaataaacttcgataaaaaaccctcaaaattaactccaaatttaatgttgaaaatttgaattttggttgataaggataagcataagcgaaaagatgagaccaaaccttttcacctttttaggtggcgggcctaaggcccaatgggctggcctatccatcacgtgagacccaactgaaaaaggcctcattagatgcgaaagtgctaattcgtgactagtcacgcaccggcctactcgcacgaagaaccccgccttttcattttttggcatacgtatgttttgtcggcttatctactttcttttttatgtaaatgtcggtttaataatttttttactatataggctaaatctagattggttttatgcatacttctttttcctttttggcttgatttttccatgggctcagtaattttggcctatttattttcttcaacttttttactttttaagtttgtttttaattttatacgtgtaaaatttatatatacaatacaaaatttatacattaacatgtaaacttatatacatgtatacatagtttttatacatatatacatatatacatatatacatatatatatatatacatatatatacatatatatatatataattctttatagtgtgtaatataaatttatacatataaaaaattgtataagtgtatatgtaccaagtatatacacaaatattttatatatacgcatataaatttatatatacattatatatatacacaaatttatatactttgtatgcatatgcatatacgtatacgtaatagaggtggagctggttgcgtatcaacggcctcctccttagtgatgggcttgtacatatggatttgatttggactgttgaggatttattgggagcatggcccatttcttcagcccaaaacaacaattatctgtggcaccttgcaaacttacaatttgagaagttgagaaagtatttctgggtatgtagctggagcgctaaatatgcatgcttatatttttgaataaagggagtagtcgagtagattaatatggtatagtgatgtatgttactaagactaatactcaggtgtatataaaagtacatgcaaataataattgagggctactacataatgctatatcgtttcgataaaaaagaatatgtaatacttataatgctatttccttaggtatcagatgtggtatctatgatactagataggtatatcgaatatgataccgtgataccggacgtaatactcatatcatgatgatgtcagcatgacaccataggtatcagatcatgacatcaactattttatttgaactgtatacatttttctagtaattttgaataatatttaattaaggagaagtgtttatttatgaaccaccatgtgtgatctgcttcatatgagttgtacggagctcgctccatcggcctacggcgagcagcactcgccggaccagtcgcatcagtcctagacacccttgcatgggcagcatggcggcggcggcggtggtttgccatatccaccgcctccgccgtagtacggcgacggtggcgggtcgtagtagtccggtgatggcggcgggtcgtagtagtccggtgagtgcggcgggtcatagtagtccggcgatggcggtgggtcgtagtattcaggggagggcggtgggtcttcgtggtccggcgactccggcggattgtcaccgtcgtcatctgcagcattaattgggagcacgcgttacctacatattaaatgcaaaaacaaatatgtacttcctccgtttcacaatgtaagtcattctattattttctatattcatattggtattaatgaatctagatagatgtatatgtctagattcattaacatcactatgaatatgagaaatgttagaatgacttacatcgtgaaacggagagagtacgtgcctatgttcaagttcatcaaaccgacgagcacaatatataattcatcgatgagccggttcgttaaatttttttttgaaaaaagatgaaattatgcatgcatgtgtgtgtgtgtgtgagaaaaacgatcgaattgattaagaaaatatttcaactccagtatgaaaatcaaactaaattatatgcacgaattaatgaggtacggtgtgtcggtgtgtgctcacgagtttgttcggcagaggcgacgaaagcagcagcgagcaggagagcgaaaacaagcaaagccttggacgacgacgacgaggaggacgacgccatgtattcttttaatttctctcctcacgaagtgaagatatatgtaatcgaaattgctagtttaatttgaactatttcgagtgtgtgatgagaatcgatcgataacgtaactagacgtgtttatataggcaggatgaggcacatacatgtgatctagtactgtatacgtactcttagtagatgacgaaccggtgcttaattttgagcttcttgacgccgtcgatcgaccgattcaaggtaaagaaatatgtactgtaatatactagcaggctaataactgcatgcaagtacttcatatatgcaagtacgcttggcatctaccatacgtacgtgctcgttcgattcaccggaaattaatcgagttgcaaattaagtgaaagtcaatcgttcgatttgatcgatttaaccacaaatggaggtgctcagctacaaaagcaaactcaattatatttgccagggccgtcggccacaaatgtggcaagtttagttaattcatcctcacaatatgtacacatataatttctggatatatatatgtcactatttaagcgaagttcatggaaacccaagtacgcacatttctattttccagaccaaaataaacgtaagataagatatgaggtggccttagataaaaagggggaaaaactaggagtagctagctagtccagattgagcgatccatccgtgaggaggcgtacgttatggacattcgtgagattgcttatgaggtggggagcgggctatcaattcgtcgatcgatccttgtgttatgaaaaggtttagctgcttctcacattttggatagataggacacaaacattttctccaacaaaagttggattaaatttggatactcgtagcacgtttttcaaactgctaaacggtacgtttcgtgcgaaaattttctatataaaagttgttctaaaatatcatattaatatatttttcaagtttgtaattaataattaaaactcaattagtcacacgttattacaacctcgttttacgtgaaacacttaatttttatcttcatctatatcttcaggacatttaaacaccaccataagctcgatcctgtaggccaactaggccgaagaaggtcaactctaaagaacgtttctatgagaacgctgacccacaaaagttgtctaggctagacaggttacgaaatgacaagtataccatgtaaatgttcctatcaaagagatgattatgtaaaacccaacataaacaaaacactagagtttgcttcagatgcttgtaagttataaatagactccaagatatgatttttattgcctttatatacttagagataagtgtttgtctttccacaacactcgtaatgatcactgtaaagaaaaaaaaaagtataaacactactccctccatcccataaaaaaacaaatatagaaccggatgtgacatattctaatacgatgaatttgaatattctaatacaatgaatttgaatagatgtatgtctaaattcgtagtatatggatatgtcacaggtactagtaggttttttatgggacggagggagtagaacgtagctaggcttaggacaactagaatctgagtcctaggcttagcttcttaatccccatgcaaattttataaaaatataatgtaatttctaaatgttgtcaagactatattagcatatctagactgtcaaagtacaataatattttttttccctagtaggtgtagatatctagtagctcagctctccgtatatacatatctagactgccaaagtacaataatatattctttttaaaaaatatatattggtcctactatatatgtggtcatagccttcccgaaaggccgaaagtgtacacatctcaaaattaatgattttgacttgatgatctccataatgaacatctctctcaaactctcagtcatcttgttgacatacaatgggatatctatgtaaataataactaatataatcttatgtctcacgccccagcccttgtgacctgttcaatcgtatctagtaggtgtagggaataagatcgacagacgcaatctctctccgaatacgcgaatattagagaataattaaatatcaaataattagattttaaactcagatcgtctagtgtatcattttatgaagctagccgaaagatgtctgatgtttcttcagtaagtcagggcagaacattgaaacaagcaaagccaaagttaatattcttcaaagtaattaatgagcaagtgacgttttataattcctctatatttgactatgtcatcataatttgtcaagtgtgtttttctcgctagctcaccgttttttaataatagatattttattaaaccggcatcgatatctgcaaagggtacacagccaacctagcttaacggaaatatatatccacaaaggaggcgcgcggggaggaccgcgagcggtggttccagtggcgggaggtgcgtgggctgcggatccggtggctggaggcggatccgacgacagggaggtattcgggtggtgaatttggtggtggggaggcccacaggtgggccgacggagctcgggcgcgcctgtcgatgggtgatgaagctcaggcggcgacggagcttggccgtggctaaggttatgagcgggtggcgacgacgaggcttgcaggcgtgggtcctacggtgtgttggcaacaacaagtacaaagattcggcgacgtggacctcgacctccttcctccgcgccggcaggagatgctctacactagtgtccaagtgcgctgtggtggtcgatttgtgaatctttagtgtgttgcatgcatgttgtggtttgtgatttcttgaatttgtgattgtgggattggaggatgcgatgtttgatttgtggatttgttattgtgggattagatgcaaattcatagaatctgcgattgtgggatgtgatgtttgatttggatttgtgattgcgggattaatgacaaactgatgtagattgtgaatctggttttggaggttctaaaaataaaatttaatatttttgccggtcgattttttttagccaaaaatctctttgctggcggtccgtataatgtagccgccattgaaaactgtttttcgcaagccgataaggcccacctacgatgattatctattttcattgaccctgatcacatgcggatagagagtccgctggtgaaaatgtgttatggccattaggaaaaatggattttgtaataatgacaagccatcgtcatttcacgacctctcccgagaaaaccaaagaaaactaattagtactccctatgcatgacatcgttgacttttagatgacattcgattattttccttattaaaaatattatataaatatcatttattttgttatgacttcttttatcataaagaaattatagtataaacttacacttttacttttacatatttatactaaaattttgtataagataaatggtcgaacaatcaacggtcgaacaatcaacggccagatcggctgacgctgcgcacgccgtcgctcggcggtggaggcggagccgctgcgtctcccgcccatagtcgcccgtcaccaccgtgcccgcagccgtaccgtgccgcgtcattatgtgaggcaaaaaattacacatctataatgtgagggaaaaaatacacatctataaaaaggacgaagattcattttatagcttaaaaagaaggcacgcagctgtagtatccatcactattcactgaaggtggacgacgaccacaaatggcgtgcaaaaaatacacaacagaatcagggcaacgcgcggatgtgctcgccgacgaccgcgcaggactgtgtcggcggaaggtgacgcagacgaccaggacaggcttcctctatgcccctgattctgttgcaacaccggagaggagtcagatccagcggtgcaccatctatgtccacgagctgccgcctaggctcactccctcggagcaaaccacgtcgccggtgtagggagaggttgtcgccccggtggccgatgatgctgccggctactcccagatccggaaaaaaaggatagagattggagagtgaatgggaacaggttggattagggtgccaacccaatccaacctgttcccataaaattactatcatggatgttcattatattggtaggtaaaaaaattactatcatcactacaagaaacttgttaatccgtgatggattctccgtgacggatttacggatcgtcactgacagacatactccgtgacgatattttgtttttcgtcacagatgagcccagtggatattcacagcccacaaactcgtgacggttttatcaggaccgtcacaatgtatgattttaaattcgtcatactctagttagcctagaaaaataaaaaacaatgtatgattttaaattcgtcatactctagttagcctagaaaaataaaaaaattgtagcgcaaagaaaaacaaaaaatatgattgcaagaagaatcaaaatatttgttaaatttgaacataatatttttgttgatttgttacgtgtatataatggtttgttaaatttgaacaaaataattttattaatttgttacatgtgtatgatgcataatatggcaaactaaaaaaatattgtgcgcatgcggaaaaaatcaaaatatttttgttaatttgttacatgtatatgatgatttgttaaatttgaacaaaataattttgttaatttgttacatgtatatgatgcataatatggcaaactaaaaaaatatggtgcgcatgggggaaaaatccgcagcatgtgggatttgaacccacattgagcaggaaggtaggaaatatgttaccaattgaaccacttgttgtagatgtccacttctgcacttatatatttttatttatttattattggcccagcatccctgttggcgtggcccattaatgccattcactcgagttgagttggtccaggatgttgcccacagtgtggcccagcagctggagttggcatttcgaaaatggggcccagcagccggagttggcatttcgaaaagaaaaaaagaactcgaatttgtaaaatagaagaaaaaaatgcaaccaacgagaatcgaacccatgacctactagtagaaggcgccccatcctaccactgcgctagttggtttgatgtgttattgtaggattctgtactctttttgacctgtgtatgtatggaggagtaaggtttcctcaaccgtgactcagttattcagttcgacacccagccgcaaccaatctaagacaccgccgccgccgacggcgaaatttggcaggagcggcgttgccgctgcccaccactgccgcgtcgttcagcaacgccgcctccttgcctaccgtgccatcgcgcatcaccgctgcacaccagccgaacagcgacatcaggcaccaccgccgccctacaacgccatcctgtagatctgcagcaccgccgccctccattgccgcaccaacgagcgatgccgagtgcggccatgcgtccacctggtgacaaattcagctgttgaccggactcctgaagcctcttctcccatctgcctcaacagccagccaaggtaatatcttcttcttcttcttcttcttcttcttcttcttcttcttcttcttcttcttcttcttcttcttcttcttcttcttcgatttagttggatgtagcatttgaattggtgcagcttgctcattgtggtttatctacaatgtttgattagatggatagaagttgggtgcacagcagactattttcccctgaatacattgacggcgtcaaagaatttatgagtttcattcaggggaaattcaatgagaatgttgaaattctatgcccatgtagcagatgccttaatcagaagtaccaaagacaggctgttgtgaagaagcacatactgatgaatggtatggaaactacttatactcggtggattcatcatggagagagcttagatgtcaatgttattgacgatcctattgatatgaatgaaaataatgatggttccacaactatggtgacagaggatgacaactatggtgatcgtttggaaggaattttaggagacctacagactgcagcggcacaagcaagaccggatgtagaaaatcaagttggtgctgaagaacctcgtgataaagagtcatttttgaatattgtcatgagagaggcaaagcgtcaactttatcctggttgtaccaaattttcaaggttctcatttgtggtaaggcttcttcatatgaagtcattatataggatcagcaattctgctttttctgcacacatgaagctattggctgatgctttcccagaatgcaatacactcccaaaatcatatgatgaagcaaaaggcattctaaaggaaatgggtcttggttatgaatcaatacatgtgtgctacaataattgtgtgctgttcagaaaggaatatgagaagcatgacaattgctcggtttgtggtctctcgagatggaaagatgcagaaagaaagaagattccacaaaaagtgttgcggcattttccattggcacctaggctaaagaggatgttttcgaccaaagaagcatcagaagcggcacagtggcacaagttaaagcgacagcccgttgagaataatatgagccacccagctgatggcgaggcatggcaagattttgaccgtgaatatcctggttttgcaaaggatgcaagaaaccttagacttggcctagctactgatgggttcaatcctttttcagaaaagaacacaaaatatagcatgtggcctgtgtttgttgtgccctacaacctagcaccgtgggagtgcatggaggaatcaaactttatgatggctttgcttattccaggtccgaaatcacctgggaaggactttgatgtatttttacagcctcttgtagaggatttacttgagctttgggcaggtgttgatacttatgatgctattactggcaaatcatttaaacttcgtgcagcggttttgtggtgcatccatgattacccagctttgagtactctctcagggcgtacaacaaggggctattttgcttgtctccattgtgacaagcatcctctttcatatgccttaaggagcaaaattggttattttgggcacttccgtttccttccaaaggaacatcctttgaggagaaacaatgagtttactggacttcacgaaagcaatgatccaccaggtaaattctgtacagaagagttgctggctgaattggagagagttaaagacgtcagacctgggaagccacaaggaactgggaaaaggaagcgttccaactctgaagggggtcatgtggaaatttggagccggatggttagtttatggaagttgccatattggaaaaaactaaaggtgagacataatcttgatgtgatgcacattgaaaaaaacatatgtgagaacctaattgggacaattctcaatataaagggcaagacaaaagacacagctaaagctaggcttgatttgaaagatttgggtattaaaaaggagctgcaatttagagaggatggagagatgcctcatgctagatataccttgtctactgaacagaagaaggctttttgtgcttttttacaagaggtcaagtttccagatggatttgcttccaacatctcaagatgtttaaatgctgagggaacaacggtacaggggctgaaaacacatgattgtcacattcttttgcaaagaattttgcccgctgccatgagaggatttctggacagtgatatttatgaagcaatagctgagttggggatgttttttaggaaattgtgcagcagaactcttaacaaggatgtgctggttcaaatgaagaaagaaatccctataattttggtgaagcttgagaaaattttccctccagctttctttgatgtgatggtacaccttgctatacatttacctgatgaggcattgctcaggggtcctgtgcaatatgggtggatgtacccaattgaaaggcgactatatactttgaagcgatatgtgaggaataggtcacgaccagaaggttcaattgccgaggcttatattgctgatgagtgtctgacattttgctctaaatacatggacgatgttgaaacaagatttaatcgggagccaagaaataaaggtttctccaatgaagaagcttatggtgttgatgtttttgggcatggagttaattttacttctgcacctgaatatgtatatgatgaaaatggcattgatcaaatggtgtggtttgtgctaaacaactgtgcccaagttgagtattacgtcaagtatgttctatatacttacttttagacttcttctatatgctacctttgtgttgcacactaatttatttttttttctgcagtttgttcatagaagagttagagacacaaggggtgcctaacattgaaagaatgcttcgacaaggatttcagacctggtttaggaaccatgttagtgttcattgtcaagttatatattgcataatgtaacttctatttttctaatatatgtgtgttgtatgcatgtggcagattttgaagaagtatagtacaaatccagaagaggtggatgttgatatcttctccttggcatgcggtcctgatttgagagttagaaaatactcctcgtgcatagtgaatggtgtgcggtttaacacagttaaccgtgacaagaacaagaagacactgaacagtggagtaatgtcacaagctacacataatggtcagttaattgatttttttggaaacataaaagagataattcagttggactataacttagaggagaggtccgtagttttgtttgagtgtgactggttcaaactggatggaaagaggactgcacttaaagatgatggcttttttaaaagcatcaatgttggaagtttgtggtacaagaatgattgtttcatattggccactcatgctacgaaggttttctatttgccagatacaaagctgggtgaaaattggcaagttgtacagacatttgaccataggcatctttataacgtaagtcagacggaggttagtgctactgcatatcaagaagacgagtgctatgatgaggaggatccacgccgaccagtttctagcattatatatgatacgcctttaaatagagatgatgagcgtggccctgtttttgaagctgctgaaattgctcggttgatgaaagaatctagcaaagaagtgaatgtcattggtgatgaagatgaagatgaagaagatgacacacttatggagtattttaacgaagaagatgactcagttatggaggtcgatagtgacgacgaatagttctgtttgaattttatgttttaatattttgtcgtaaggctcaattagtatttgagaccatgttctacttatttgagaccatatgttctattattttagatagcctcaatttgtatttgagatcatgttcatctatggaatttatgtataattggttcgatgccaaactattcatatccgtttttcaagttttgattctttgttggcctaaatggcatttcaacttgcctgtgtcaatgaaactacagatttagtctctactagttgagcctttatttttttattaactagaaaaaatacccgtgcgttgcaacgggtgaaggaatccgatcgtctcaacttacttagtgtgcgagttttttatagagatttcctatacggttccttttgtatttccaaaagcaaacaaacttataaaccgactcaaatacggatttgtattttcaaaactgaacaaacttaaaaacgactcatatacggatgacataccaaagtaccagcaaaaacatcttcaatttttataatagtagacactttgtgatgggtactagttgagcctaaaaatgtttttaaaaatataatcgtgatgcaccactcacctaggatatgtacagcaccacatgacatgataaaccatgtgcggtgcttcacatacagctctcgccggacatcggggatcgccttgtttggcgttgggcgagtgacctattgtttttagtgcttttagtgcctgattcgactgaccttctttaaaacaatcatatctttttcatacggactcgaaattagacatataatatatccacagacatctacagaaaaagttacatccgattctccccgctttgccgggttcggtgaaattagaactaccaaattccgcttacaaaattatgttttctaggcgagaagctccggaaccccttggatagaactttgaaaaaattcctcatgcttcatcttttgtccgtttgagctaagaatttctatggttggttgcagtgtgctccgagactcgaaaaaaatatcaaaaaaaaaaattcgcatatctctcctcagcactagagagagaaagcaacattgactctgtgcgttcgctccgtaggtttagtacggtgtgctgtctcctcccagctgatcatgttgtgtaacataaactctgtacatattgaagtgcaatccttttgcgtgttcgcgaaaaagtaatgggatcatggggcttgtttggccaaaattcctaattcctaaatttagattagtggaatatgactaataccgatggaataagatagattcaagggaacaaatttgcttcatgcattgttttataccacttactagctagaagcactaattgggaaattatcaacacctatatagttttattaatcattatcaacatttttttaagataataatcatcaacataagggatcataacatgatgaactatgtgtatcatatatggtgcttgtctaacctgattttctaattccaacaaaaaaaattaatggagtatgaaggaatgagacagattcaatcattcaaggggaacaaattttacatagtagcaaatctcaaatataagacttattataatatatactcatctagaaggttccaaacaaaacaggggctttgagttttcaggataaggggaaatcccgcgcgcccaagcggcttggcgcgcttgatgtgcgccagcccgaaatatttcacagtccgaattaccttactacccttaggttcataaaatataaaatatagagaacacttccatcagaaaatttctcaagggtacatcggtaattatgaaacagcacttcccaattcctccaaaaacctagccgccactcatcctccaaaacccatcttccagccgccacccatcttctagccgccacccatcctccaaaaccctagcagccacccatcctccagccaccttatctcaccggcgcatcaaggcctgcccgccgccacgcatcctccagtttcccatcctccagccccgatggaaccctagaacgctgttggaaggttccatccgccgcccgcgcgcccatcgtcactgggaggctccgagcgcggccaccaccagcatcgctgttatggcgccgaagaatccaaaaggaaatcgggtagcaggtatagtcctaacatcacctcgctcttgacttttttgtggcgtttggatttgtggagaagaccggtggatttgggaaattgagggatgatagatgcaaagctctgtttgctggattatagttagaacttccatttgcagtgttggtcattttacctgaaaagatagggtacatgcttctgcctttgcagtaaaaaataggttcacaagatgattcttgttcataccctacagttatacatgaatatggaatggaatggagggggagagagtcatactttgcttaattactggtaaacaaaaatcaaagagtacaataattcatttagcatatggcactttcagtcttgttgacaaattcctgatcagttcatctattctcctgatgcttgtgcatgcaattcatgacaatattttaaacaacgtttagttgaaaggcatctcaaagagccagcagtatatatcatttttttactagcaatatatatctttgagtccactaaccattaataatattccaattcatctgtacctcatccaagacatggtgtgctattgctactcttgtggcttatctattgttcactgagtcagtaacacattaatttattgttgctgtctaccatccaccagttcatctgagtccatacgaattggagcgcctaaaagaatgcatgaagaacagtgcaaggctgaaggagcttggacttcctgatcgctacaccccagttttggaaggctatgttggtgttcattctgaccagaatcaaagtggagattcggagtccgagtatgatcctttaaaggatgatactggtgaaggagatttgattgatgatgagaatgcaaaggttgtaattcctttatgttgacaagtcttaacttgttatttttcttcctaattcaatgtaatactatgttgaccaatccatgcttttctttccagcagtgctctaaggagaagactcgcaagaactgtaacaacaaaacttcaagtatccagactggtggagtcaagtttcggtctcgcaagagagtttatgcagagcaaatgactcctaaagttacaaggtcaaagaaaagcattgcccaacaagatgcaagtctcacaccaagtgatatttgtatgccagctacatcacaagctaacgctggagatctcgatggcaacttagatgaccacacacaggctgctgttgaaggccagttctactgccacatttcttggttacattccattaacatgagtcagctataaaaatgtttaacttgctgatctaagtttattgcttgtttaccttttgaaaatattaacttgagttttaagaataaaaaaaattaatgaaaccaattttcacatttttacttgacaacactcacatgaccaccgggtctgatgctatcgaccaacataatcagcacaaccatatggacaatggaggtgatgaattcttactgtcgttatgtaagttttgtttgtatgatgaatgcttttcttacttgctgcccttttttagatggcttcacccagcatgatgacaacacccttgtggctgatgtagttgatggcattactcaacacggtgaccacaaccagattaccaacgaaggtgagtttgttcatctattttccatatttcatattgtctcagttgatcaatatttgtatgcaaagctttcaattcatgatcatcttggatcaatgtttgcttcacctcaataattttagttttaatttcaactgcaatgtacatttacaactagggggagtggagagaagggaccggggaaataatatgggacgtggtctccaaaggttaaaccgagcgtgccgtggcaagctgcaagttgtcataactgaagggaatataaggccagtggttcctcttgttgctgcaaagtttgcaactgaatgcaacatcatagttaggaaccatgtgcctatactcccgcattggaagctatacaaggaaaaacctgcatctgcgtacgttaatctgttcttaggaaaactaaaggtacatgcattctctggtcctttccacatttagtctcgatagaagatccattgtttgttattttaagccataaattactgaattgatattcttttctataaatgttcttccattcgattaggccaagtttgacataaacatagaggatgatacagttaaaatggcttgtactgagatgatgaagtccgcagttcgccaacaaagatacaggctgaagcaaaaatattttgatccttttccactacatttggttacaaaaacttctcctgtcaaattcatgagtaatgaacagtggactcaactcctagaatcatggaagagtccccaaaagatggtatgttctctctgcaaaaccagattgatgccttgtgcatgctaatctatcaccaaccttacatgtattgttgtctttaatgtaggagatgtgtcaaaagaacaaagaaaaccgagggaatgttaagtaccatcacacaaccggatctcgtgcatacatggttcatgttgaaaatttggtaagtgggccattttaagcaccatataatttttttgtatgaacaagctactgcttaaatacgtctgcctcagcctaaacaagatgatgtccatgctcatgttgttatgttcatgagagtccattagtttgtggaatgttcaaggacactatatctgatccgatgccaatacattgtgtgaaaggtgacgagttaggtttccatctatgtctaagttgagtgtgttaatagattaaaagttattgtttttatgtctgtgtatgcagtgaaagacctctgttgcagttgtttgtctaagtggaaaacatagtgtgactgtgtgcaacaaatgaggctagaaattagttgaacatgttcttttagattctcaattgaacagtagctgcccagattttcgtaacatcttaattcatgctggacctaatgcatatatgttgttctcaggatgacaaatacaatgatgaagaacctaatgcatttgatttgttcaaggagttccactacagcaagaaaaaaaaatgctacacccctgttgtacaggaggctattgtaagataattttcagactttgatctttgtagtgcttatttttaattctctcaacatcaaccatgtttgctactttcttgctagactcggatggaaaacaagctatctacaacaacagaaggtgaagaacttaagtcagcggctcaagttgttgctgatgtgcttgctgagaacaccaagaagaatcggttcttgaagaatgtggggttccataatgcccagcctagattcagtgagcagagcactgagacagaactagaagcggagaaaaggaccaatgctgagcttcgtgcacaggtggctgatttgtcaaacaaagtgcaagaatctgagcaggcaaggattaaagaccgagaggagatgaagaggagtcaatctgagatggaagcaaaagttaatcttttgctcagtcaaattcgaccaagttaagacatgcatggtgcatatcttttgcctctaactacatgcattttgctgctgctaacttgtgtcaagtcaatttcgaccaagttaagtcatacatggtggtatatattttgttgctgctacttgcattttgctgctactgcatgctgcatgaatcaagctgctggacttgtatgcatttcctgagtctgtgttattggctgtgtgcacttttgtatggtaactgttgttggatgaagacttgtgtaatgtgatgctggatgaaaattcatgtgatatgttgttggatggaaacataagattttttttatttaatgtgctgctacattaattccttgtgggctgtgtatgtgggctgaatgtttgataatgggctgtgtatatgggctatatgtgctgcagtagtgggctgaagagtgggctaaaaattagtgacgaatttgggctgcagtatgctgaaatgggcttgcaaaaaaggctgaaaaattgctgcgaaaatggctgaaattgggccaaaattggcccatctttgattctggcctgttaacaaatgggctgaggtagtgtccatgtcatcatccatgtaagcaaccatgcaagcatctatgatgatgtggcaattcatccgtgacggttatttttcgtcacaggaaatgggcttgggctggactaactaggtctagggcaatatcgtgacggtttaaaaccgtcaccgattctggtactctgtgatggttttcgacaaatcgtcacgcatgtcaatccatgacgctcaatccgtgatgatttcttaaaccatcacagatgctgtttggtgatggttttctagtgatccgtgacagatatttttcatcacggattaacaggattcttgtagtgcatggatgtgtgatgacattggcaggattatgtggtggtttgcgatagtgataaaattactctggatagtgagaacaaaaatataataacaaaaagtatttttatgacataaacaaacaaataaaattataaaatctgtggcacgtaacagtgagcggatggttatgctaacttgagttaaaacataactagtaagctaacaccatgtagagtaaaaaaaagatgtcgtctgacacatattgaaaaaaaaatactctggttggactaaaaatgttaaaccgagttaaataattactccatatgaaacaacataacactgtacgtgctaatatgacctaatagttaaaaaattactattaaaaatagtcaaatatcaatactacagtacatcgcgtcatcgccattgtctctgtactgtttctgttcaccggtatagtacgtcgccggcggattgaacgtgtagagaaacagaaggcaaaggtgatcccttacctgaacatgtgagaaacataagttacattatcacagaacatgacaagttctgctccaaatttaagtgctggtgatcagcaatcaggttctgtatcaagccgaatgttcctctccctatcgacaggattagttcatctcaagaccaaagttgctaatcgtccacttgctcaaatcagtacaaaattttatttatgggagcttcagctactccagtctgcactttgcagtacaacgtctaaatggattgcacaaagaaaaaaacaccaacaagtttgacatgatctgatgatcagtaagcaacaaaaattgaaaacctgaagttccacaacagggatagaactgaattttttacattactggacaacagggatatataccatgttctcacactgagccgaaaaagaatcagacttcacactgaactgtccaagaattatagaaactctgaaccataaaatctcagaggaacaacataaacgcgatgtactagtgtacttaaaattataaatctgaatataaaaagtcaaggctgaagttggagtactctgcattctgtacagcgaattgattttcagagaactgaaactatactgccaagtcatcatcctccacgctaaaaagcacaaacattctaatgaatagagaaagacatgatagactcctaaagttccacaatttgaaccaaagaaacagattaaaaatctgtgtcaacgtaactaaaagccaatctttatgcaatctctgtaattcaaccatgaatgaacaaaagaaaaatttctgcaacaaaaagggaaagcacagatcagcagggttgcgtaacaatacaacatggagccattttattcaacaattcatcaagaaatggtattggtatttgttaacttcagagagacagattttcaccatcaaaagttattggcgattttctcaattcatgctacactttgaacatacacataatctccaccagaaatatttgcattgcactttcgttatcatttaatcagtattggctacacttcaactaggtagcaccgaattacacaagatttgctcacatggccagaggggaagcggtacctgaacggggaaaagcagcacctgaatggacggctgccagcgacctcgacgatgggaaggcgggggcctggacggaggagacgacagaggcggcgcacgacgaagtcttcgtggacggaggcggcgcgggaccccatgccatggatggaggagatgcggcaatctaggcgaggaatcgaagacggcgtgagtgcggtatcatccgcagctagagaatacgaaagaaagaaaacgcgagggtacgtaaacatcagacatgcatgcgcgagaggggaaaaggacgcaggcaaagaaaaagtcgcacgattagtgggattgggagcgcgtccacgctcccaagtcttgggctcagattggccctgattttagtcggaggtaaattttgggaccatggttcggaatctattggaggcctgtttttcatcaaaatcctaaaatttatcttttaggaacctatttagccctctcttggagatgccctaaggtgccatatagtagctctctctctctctctctatatatatatatatatatatatatatatatatatatatatatatatatatatatatatatatatatatatatatattagctctattatacacccctcccttagaataactattctacacccctcctcccaccttccatccgtccccacctcccgcgccccttcctccctccctcccgtcgctcctccccctccttcctcctcctgtcgctcctcccccattcctctctccctcccgtcacgccccttcctcccgaagtctcgatctctcatctccccccccaatctctccttttcttcttttttcttctctccctccttcttctcttttttttagaaaagtcgctcctccccctccttcctcctcctccccccccccaatctctccttttcttcttttttcttctctccctccttcttctcttttttttagaaaagtcgctcctccccctccttcctcctcctgtcgctcctcccccattcctctctccctcccgtcacgccccttcctcccgaagtctcgatctctcatctccccccccccaatctctccttttcttcttttttcttctctccctccttcttctcttttttttagaaaaaataaaaataaattggtgaattcaagacttgaacccaggatctcatggttcatggcgagcacttctaaccaaatcaccatatgatgatttgtgaacaaatcagttatgtacctgtaacaatcataccttgttactatgattcggtagtaacattatcctagaagggtagtaacatcatatgttactgcaaaaatatataggttgttactgcaaactttataggttgttactgcactttttgcagtaacaatatgacgaaatttgcagtaacagagaatatgcatagtaacagtggccctataatagtaatgttttttagatctagagtattttaaatctcaatctttagagagtactaacgtacatgtcatgtcttatttttctaacccatttgtatcatggcgttcgtaaaaaaaagtgcttaacgaaactagaaccgtaataactattttttaacgttgttactgcgaaaagcagacgtgttactacatattagccatcgtgttaatacgctatttcagtgagacgatgactaaaaaagaggtacatctcaatctttagagagcaatatctctcacatcatatcttgtatttctaatccgtttgcaccatgaagttcataaaaaaacgctcaacgaaactagatcatggctactttttgacattgttactgcgataatgttgtcttgttactgcacgatgaccgtcttgttactgcacgattcctgcaagacgagagcaacaaagttgtaggtgggggaaggagtggtgggcgggtttgaccggcgggaggacgctttgaccgaggtgggaggagggttttgggcccaagggagggtggaggaggggtttgacccatgggaggggggtgtagaatagttattctagggaggggtgtatatatatatatatatatatatatatatatatatatatatatatatatatatatatatataaaggaggtaatagcaaaagattatcggctagtttataaaaaagtcaaaacggaggtagtagtaactcaaaaaaaagggttagtttttttatttttttttaaaaaaagttagatcccgtgcttattgcttgatgcccacactcttaagtggcagccctaatgggcgatcgatctcccgccaatgggtctagcgatcagattcgctaccccctccctccctccacttggtttccttttttggcactgtattactttcctattttagtaaatttatacacctaaagtttatacacctcaagtttacacatctaaagtttagagaccaaaagttttataagtcaaaagtttatatatccgattcaaatttgaatttgaatttaaattttttttatatatagtttttctatacatataaagtttatacacctaaagtttatacacataaagtttatagacctaaagtttataagtcaaaagtttacatacccgtttcaaatttgaatttgaattatatccgattcaaatttgaatttgaattcaaatattttctatatatagtatttctatacatctaaagtttatacacctaaagtttatagacccaaagtttataagttaaaagtttacatacccgattcaaatttgagtttgaattcaaatttgaattcaattcaaatttaaattcaaatttgaattcaaatttgaattcaaattcaaatttgaattcaaatattttctatatatagtatttctatacatctaaaagtttatacacctaaagtttgtagactcaaagtttataagtcaaaagtgtacataccagattcaaatttgaatttgaattcaaattttttatatatagtatttctatacataaatttttctaactttttgttttttaaaaaaattttgtgtggtgtactgtagtaggggaggagggaggagtgtatctagtagtatagggagggagcgggcgggtgatcgctgggcgggcgggggagctatcacccacccattagcatttccgctcctaagtcgacaagtgtttctagctagtcgtaagtttcatgaattaaacacagtggtcatactttgggctatttaactagttctgtcgaaaattatttaaaaaaactgattttttttatgttcagagcagaaaactttaattctgttattatttccaaaattaatacatacatacatacaccacttgaaaattatatatgtataactaatccatcctattatgttttccattcgtttcaagatatttcctcaatttaaaatttctgaaattatatattgataaataaaaaatcattttcatgaaattcctaattttaacttgtgttgattaaataattccaaatacgtatgtaataaatacgatactatcgagttgcaaactcgattcaaaagtatcctgctcggccctcacattttggggcaggggcacaggcccaccaggcttgcacgcgaccgtaagagtctaagagacccatgtgtcatgggcttataattggcccattatgataataatttgcaaacgagggcccattaattctgtccacgggaaaaataactctttactactttcatttttttttggagaaacttttttagtttaatttttaccaactgcaaatgtatggcaaaacggggatatttctctcatatattgttcgacaaattctcatttaaaagcgtggttagcaactataatcgagtttgcaagaatcctaatacgtgcgcgcgccggcagcacgcactcccggcccacacagcccatgcggcgcgcgcgcgatttttcttttttcgctaacctctaccgccgttttttcttttttttccttttttcctttttttcgcagtttgatgccgtatggataggagaaaaaattgtaattagttttacgagttattagttttctatttttactagtaatttttaaatctgaacttaaaaaattttaaatttggacttgaaagttttcaaatctcgagttgaaagtttttaaatctcgagttaaaaattttcaaatctcaagttgaaagtttttaaatctatatttgaaagttttcaaatcttaagttgaaagttttcaaatcttgagttaaaaattttcaaatctgaagttgaaagtttttaaaaatttcaaatctggacttgaaagtttttgaatctcgagttgaaagttttcaaatatcgagttgaaaattttcaaatttcaagatgaaagttttcaaatttttcaaatctggacttgaaagttttcgaatctcgagttgaaagttttcgaatctgagttgaaagttttcaaattttggctttaaaaattttaaatgttaagtcgaaagttttcaaatctaactgaaaattttttcaatctattagtaaaaaaaatctgataacaatccggtccaggtggggttggccgagacccaacaaattaaggatatccggaccccaaaagttcttaggcacactcactcggggaaatgcccaatctccctaaaagactagtccaataaagaaagggtggctcttccttttaaggcggcttcctcttctcaagctaagcaaggtgggattattcagagacccacacggtcgccgcccgacttttgcgtctttgccagcgggtaatagtgcaggatgtcctcatcaaaatctcaaaaaaaaaatcttcatatttttttctaattactgtcattagcgttaactaatgaagttagttacgcgcggaagtgcgtgtcgctggcgcgcacgcactagctagcttccccctcgagtttgcccctctatctaaaaaaatcactgaacaaattaaaccacttgtgagagcgagtgtactaattttatatttcagactttcagtttgttgcctccgtatgcatgaatatatatatgttcaatggccttagcagttgtaaaatcaaattaaagtcaagagtactgtaactgtgtaaagtgaccaataattaattagaatattctgtgtgaatgctccatcaaagcttcaaacaaaattaggatattattaggcggtgtggccacatccgacgtatatctcagcaatagactcgatctccgtacaacatatatatgcatctctcggtcatctcgttgacatgccatgtatatcgtctcatgtaaaaaaacaattaatcttatgtcccttgcgaagttcatcctgagtgaggaataaacggcaaagtcagcttttacaactccaatatccttgagagtggcaaaaacaatctttgatgaaacaatatagaagtgtcgggtgtgatcaaaatacaaattatttacatgattggttctgtaaaatagagtctggacaactgatagactttagagaagaggttgggcaaatcagtagatctgtccgctatgctacacgacacaggaaacgacaatttaccaatttgtatactgcaggttctcccaactagtctggccaaaaagtcagctatttatctgcatttaccgctacgggagaagttccgtacgtgaagttctttcttttgcctttgcaaggtcctgtacacagttaagggcacgtcaaaactataagtttggttgaatttggaatgatgtgatggaaaagttagaagtttgtgtgtgtagaaaagttttaatgtgataaaaaagctgaaagtttgagaaaaaaagtttggaactctaaagtgatgttgaattcctgttctatctatatatacgagtcatgtaaagcttttgttttttctttctttctttttttttagagaaacaccgggggtagggcccacctgaattgaatcttttctttttttttttcaaaaaagcgatctttctctccctcgttcatgacaaaaacacattaacgagcgattctgccagtacgttaattaatcattcagaagtaattaatctcatccatagatgtttgcaacacgactaggggtgaaaacgggcgggtacggtcggactataacattcccatatcctaacccatattaaattcagagttgggtacgggtagtgccgaataatatatcactcatcccgtatcctatcccatgttatttccttcgagtcggattcgagaacggatatctatttgtatctctaattcatagatattaaatataataagttaattgaagtactaaaagacatacatcaagaaaaaaattatacaatttacaaatgagcatgtaaaatagtgattaactaatcttttatcatgtttttaagtgaatttgtaataaattttcatacatattttataatacgggacatccgggcggatacatgtcttcccgtatcctaacccatatttttctaacgaattcggattcgaactcggatagtatcgggtatcccattttttctcccatattccactcgcgagccttgggttgggcgggcggtcgggaaatacccgtcccattttcaccgctaatcacgacaggtgaagcttttctatctttaggaggaaagaaacagtcctatgttgagctggcgtagaagacaaacagtaaacgtatatacttttgtctcgctctcaagaaatttagacaaattaactaaagtagaaggcttttctagattgcagtgagtactgaagcttttctatcctttaatttagaaggaaagaaacagtcctagattgaaccggcatagaagacaaacagtaaacgtaatacagttttgtcttgctagaaatttagactagaaacttttctagattgagtggtactgaagcttttccattctttaggaggaaagaaacagtcctagattgagtggcctagaagttaaactgtaaacgtatgtacttttgtcttgctcttgagaaattcagagaaattaacatattctcactatatattattttactatatcaattatcatgcttcttcagtcctacttggtgttaatttcatcattatttcagtctatataaaaacacactactaaaaaaccatttttcatagtaacaccttttatttttattggcgagtttaatgaacccacgcttgtaaagatacttgagaggaattctgatcaccattttcgctggctgtcacttaagagagatcagcttgcaaaaatacctctattttcctaagcggatctcttaactgacacccagcaaaaattggattttcactggcggcggctaaggagcactgactgccaaaaaataatagctatatttaaaatcacccaatctcacctcctcctcagacttcacctcctagctccttccccaagctcaccccctccccaaccctcgtgcccctatcctttccttctcctcctcctcctcttgacagcgacgacgactcgatcgaggggcacgcgcggacggcgggcctagctgctgagagtcacagatggtggactcaaccacgggaggagcatgggcggtggatccgcggccgagaggcaggcaatggcagtgatggtagacgggatggatccggcggcgagtggtgcttgggaccgctagatccacctcctcgacagcaaacgagaggggcggtcatggtggaggaggtggatccagcggcattgactaccacgatgatgatggctaggcctcgagaacgtcccggtggctcctccaccacctcccctctcccagatccggcaggcggtgaatctggaagctcgaggtggtggggtcgccagatgcggtggagctcggtcgtgagaggcgagcaatggatatggtgatgacttggggcttgggtgatgcattcgacagcatagcttaggcatgggtggcggatttggggagcttcggatccttcgggcggcagtggtgctcggcccgtgctaggtcttcatctctcggtgatggcgacgacgaccgggggtgacgacgatccaatccggttagtttgtttggagatggggattgatccaattgaatacctgtgagtagaaatttgttactgtaaattgtgatgatttatggatttgttaactttgggatttgggaataatttctatcgattttgggatcgagcagcatattctcttttggtgctgacggaggtgaacggagtggggttgcttcatcatttttttagcgctggctagtattattacaggcggatgatataacgtagcctcccgtgtaaattcatttctacatgtggctaccttgcaaagagcgctagtgaaaatggatcggcactggcagttggcaaatgctagctaaaatgctgtattatcactggcctttggtctctggcggtgtcacctgctgcttgtgaaaacctattttggccaccatgaaaaatcattttttatagtgacattctcatcactttccaataatcgaattcttgcgagcatatatagtagacttttatggttgtaatttactccctctggtcataaacattgatgtttaggataagatctttaaatttttaccttcgactttacattagaataactaagttttccaatgcatttgcattgggataaattgaatgttataattagaacaacaaaatcttggtgaaacgacgggagtatatttttttagtttatgtttccatagatgctaatcctatactttatatggaatatatttggcatacgattcacaactcccctcccctatcatttgaattatgatattattatattatgatagtactttccaagaaaaatctatgcatacccttcttttcactaagtactattgatgagttgttgataatcatggtttcaaaagtttgaccgaatcttatactaaacatcaaatattattaatgattggaaggaataatatttgatgtgtgcatacatatattgtcatttgcatttaactatttctcgtaattctaaaaaaaagagtttcttgtacttatcgcttttctaaagtaaattgtagggcacaacatcttcacgactagatacaattcacaataataataaattgaaaattgcatagttttgttgtaataacttgataaatttaaatgggtattaacttaggggatgatctattctaagatcacgctttcgagtgacggatgggttggtttacgagatggttaggcaatgatataaggcgtagcgagtccttaaaatacaagtgacgaatgacaaaatgggtagttttagcttgattcaacaagtcttacggttgatcataagctgtggtggtctggtatatggattcaaaaattttccatagcccaggcctggtaaacacatgtgtaaattattctatgtcatcgtcgttgcacacccaaaatacaaggcgttatatcataagtaatctagctaccaatgagccggaagggtggctacccctgctgatgaggtcgtcgcgagaccttggatctgcccctgatattcatttggtagctagcactctctgaaggagtcataataagtactacctccatattttaatatatgacaccgttaactttttatccaacgtttgaccattcgtcttattaaaaaaattatgtaagtatcatttattttattatgacttgattcgtcatccaatgttctttaagcatgatataagtattatcatatttgcataaaaaaattgaataaaacaaatggtcaaacgttggtcaaaaaatcaacggcgtcatacattaaaatacggagggagtatatggcagacaaatacatctatagaagcgttattataacgcattttattcatagatcagcacaaattacaatactacaatacctgacacgacactacgactgacgacaccaaaggcacggattgttgcgtacgtatagcccttgtataagagcatatacatacatacatactagctagccgtgtgtacacagtatacacacagcagatgcaatcctttattgaccaagcaaacagctatagggataattaagtagctatacaagcacatcatcatgcatgtatagcagatacatatatctgtaaggttttatgtgtgcgtttttatttgtcataatccattattcgttcggttcttgcctcgtcgtgctcatgagcagcagccgtggcacttgcctttccacttgcagcatgggccgctatggccgctgcagtagctcatgcacttgccgtcatagtcgcagcagcctttacagttgcaaggcccgcacttgccgtctgcatggatacatatatatgggaaattgattcatttatatggtgatatactcctatattatatatattcgttaattttatgcaagctcgtgaagaagaccaacaaaaacatcaaattaattaagcatcatcgatcagcaggtgttaagcaatgcaagtagaagctgatatcgaacacgaagtatatacgtactccctccatatgataatataagagattttggatggatgtgacacatcttagtacaatggatctggatatacagtatatctagattcattgtactagaatgtatcacacatctatctaaaattctttatattttaggatgggggaagtattaatgagtatcgatcgattaattatatattccttgatgttataattaaactgaattataaatgcatatgtatatatgtagtgtagatagtgatcatcaccggcagaggcgacgtcgacgacggcagatgcagccaccagcatcaggagagtgaacacaacgaaagccttgttggacgccattaatttgtgcaagctagctagttgattaattagctccctcgatctcacttacgatgatgcgtgtgttttgtgtagtagatggcaagcgtgaacttggcctatttataggcggaaaatggcttgtgatccaaggtacgatcaagtacaggggagccttttagtcgatcccgttgacgttatcacatggaccgattcatggtgaagaaatattaagttgactgtacgtagcattctgtacggcattaattagtgtgtgattatttttagtcagagctagataagaacgcacgacgtctatgtgatacgtgcttagtgtgtgttggaattaaacttgacaatggataccaacgttaatttttctataacacattgagtaaactagatatcattgtatatatatgttgtgaaagagtacaaaagatgatgtgcgaacaggctacatatatatacacacacatatgcgactacacgacgtgataaccaagtcagcgaggataacctattggaagtttttactaccactaacaagtactagtaccaacccacctaccatcgtatatacttgcgagaatcttagtgaaatctacgaaattaaaattccatgtagaagatacttaaaattgagaatctaaataggaagtttttagtcataaaaacatttcaatccccaagagagatcttttaaatctaaataggaagtttccaatatcaaaatcaaaactcattcaaaccgaaacaagagaagagagtaaatgttaatccttcagaagtaatagtcttgtccgtgtatgttgcaaccctgggtgaagcatttcaattctctaaatataattataactagcaaaagtgcttgtgcgctgcaacaagaaaaactaaaattaaataaatttatcaaatgattagggcttaattattatgataagctgaataccttaagaaaacatattcttcatataggtacgccagattacttattcaaaactgtttattttttattacccaatcaaatatagttattcgtggagaattaagaaggccaccttgtatgcatgtaaactgtaggtgtagatgaccatatgatccgaggcccgacagtccggcccaatgcacggcaatttggcccagcctaagcacggcattgcccgactggggtcgtgctcgtgctggcccggcctaacctaaataagaagtttttagtcatcaaaacatttcaatccccaatagagatcttttaaatctgaataggaagtttccaatatcaaaatcaaaactcattcaaaccgaaacaagagaagagagtaaatgttaaaccttcagaagtaatagtcttgtccgtgtatgttgcaaccctgggtgaagcatttcgattctctaaatataattataactagcaaaagtgcttgtgcgctgcaacaagaaaacctaaaattaaataaatttatcaaatgattagggcttaattattatgataagctgaataccttaagaaaacatattcttcatataggtatgccagattacttattctaaactgtttattttttattacccaatcaaatatagttattcgtggagaattaagaaggccaccttgtatgcatgtaagctgcaggtatagatgaccatatgatccgaggcccgacagtccggcccaatgcacggcaatttggcccagcctaagcacggcattgcccgactggtcgtgctcgtgctggcccggcctaacgtgctccctcggcatggtgggccagcatggcccagcacgaccaaacaaaataattgagggatccatcatagacttaactcagccatttgaggtacagcccaaagaaaagaggtgtagaaaatagacttattccagccatataagacacagccaaagagatgagggaggcaaaatagacttattctagccatataagacatagcccaaagagataagggaggaaaaatagacttatttaatagagaagcacgatggaccactgtgccttcgggctgggcccgagtcttattgagccgtgcctaggctgggggtgcagcccgtgggcaggcccgacccgagtcttattgggacgtgcctgggccgagggtgtagcccgtgggctggcttggcctggcttgttggtcgggttgtgccggcccgactagcctcggcccagggccggtcatgcctgggtcgtgctggccaggtggcccatttgaccatctatagctgtaggttccatatggaaaggcaacaactgaagaagattgcagtcaatgctgagctgtacaagcttgaaggagtttggcatcaagaatatcaagctcatccatgagaccatgactggagccagcacccctcctcggagcatcggcacacttcaccaggggcctcatctttttgcttatgctggtgtttatcagccaaaatttgaattttcaaccttaaatttgaagtttattttttagcttagcttttagattactaagaacacgtatataaaaattttattcacaagttactttttgtttgtaaatatgtcttttggcttatttcacaaataagtgaaatgatggagctccaggatgccctttgacctcttcctcatatgccaatagaatctgaattttgatatgtgctagaagaatgagaaggcaaagctgatttttgtgtctgaagtctgaaaattaatatgcattatatatattgatgtgtgtataacaatgccggtcttacgatggtgtcacggtctcacaggactcgacattaattttcaaattagatgtagagaagcacttgatattatagtggtagggatgtaatattttaattctgaaatcttatgttcaatttccaacacactcacaattcgatgtagatctcctcgaagttgtgatggacaacatcatcaccggccgactgccctcaggatcgatagggatgctgtgtattatttcctcctaccagctagctagctctctctgcgcatgcatgcacatatgcatgcacatgtgtactccatactcttaaaggaagtcgtttaggatagcgacacggtcttcaaaacacaactttgactacttatttttataaaaaatatttattgaaaagtgatatatgtatgcttttatgaaagtatttttcaagacaaatctatacatataatttttacatttttaaactcaactacttgagagttattcatgatttatattttcaatgtttgacttaaacattgtcctaaacgactttctatggagtactagtatacatgaacatcatcggcggcggaccacgcggtgcccatgtcgacgtgtcgcgcttgccaccgcgctggacttcatcgcgcacggcgctgctgttcgatgcgagggagaatggcacgacggcggccggcgcgcaaggagtttgcgctcggctggaagctgaagcacacgcgggcgcagactgggatcgggccgtgggcgtgcatgggggcacaataaaagagaggcccagccgagcccgccgagcgcctcgagcaggatgaggtggccgcgaggcccacgacggatggacggaaatcctatatacttatatagtttattatattcttatataatttatctccactaagtatagttaatgttatttctctcttttctaattaagccacatcaccccaattatttttagcctttgaaagatggatctatggaccaaattgtctcttcttatttctctcttaaaaacatgcaatctcaattacttttagactcaaaattatatcaaattgttttcagttttatacatattatgcaacttaatttttcgcagcaacgtgtcgggtattcatctagttgggataactgatgtcacgacggaccaaaaggtgagtgagtatggaataatctttaagtgactaactctcactactgcacaaaccgtaatagctaggtgctaattgaaaatccactagtgccagagttttcagccgacacctttcaagcttaggaatcagcaccttcaaagttccagaaatatctctaatattataaaagttgaagatgttttcgctggcactttggtacgtcatccggtgtgcgagtcggtttttaagtttattcgcttttagaaatacagatccgtatttgagtcggattttaagtttgttcgctttcggaaatacagaaggagtcgtataagaaatatttttttaaaaaaaactcgaatactaacttgagatgatcatactcctaattatagctcatgatttttaccttaacgaaaccatataacaataataaaatcaaaatagtcttcacccgttgcaacacacaagcattttttcgcattttttctagtataaaaaaaagttggctcgattctgagctgatgcatcgagccactccctatcacacctagaccatcctacatccacataccacaatcaatcaatccaacaatatcccccaaataacacaacacaaatcactatcgatccatcaaacaacaacatcccccgcacaaatcacacaacacaagtcataaaaatccactcacaaattttggcactccaattagaagtgccccactctccgcgttggagtaacctacgctcactgtcgtgttggctggatcttgtggctgccgcgtctggtaggggaaagaaagaggctgtcgccgccgcgcgggaaagaggaagaggctcatggtggctggatctggtcacccccgagctcgtggtagccggatccggtggccgccgcacagaggaaaggaagaggtcaccaccgtggcgccagggagaggaagaggcactgctacagcgtggtgccgaggagaggaataggcggccactgccgttccgctaactccgtggtagggagaagaagaggtagtcgccatgaaaaggcggctgccgccatgctaggagacgggatcgagatggagaatgatggggagtgacgtaggggataagggcgttgtgggaggataaggacgcccactccacgctatgatccaatgggctatggcgccctaaatagccaatagtatacttgatctagcagatcttgcagttgatcatgagatagcaccctgagagtcttttgtatggtagacaaagatcagggccgtgtctaggaatttgagcccccgtcaaaacataaatttgaagcctggtggcgttctactaagtcaaggttgggaaaaagaaatatgtctagatataggtcccgttcgttttttctgtaaggctaggataaagatttggattctcgtgacacgcttatcaaactgctaaacggggtgtttcgtgtaaaaactttctatatgaaagttgctctaaaatatcagattaatctattttttaaatttataataattaaaactcaattaatcacatgttattaccacctcgttttaaacacttaatctttatcttcaggagattcaaacaccatcatagtgatttatttttattatctgaaaaaaaaaagaaaattttgatgcatggaatgcaccctcataccgttgtagtgacctatacctttttgagttggccatgattaccattgaatactaatcgaaaccatagaaaataagtatgttttagccaattaattaaattaaatcattaaaaaaaagggagaacagaacttttaaaaatatagtgacactggtggagaaaccatctttggtcggtcggccgaaatccacaatagtctcggttccactaaaaaccgggactaaagatcatctttagtcccggttgatggctacagcgggcatatttgatctttagtccaggttggtgtgtcccggttctaaacctatcaggccttttcaggccccccgggatctttagtcccggttggtgttaccaaccgggactaaaaataggctctttagtcccggttggtgttaataaccgggactaaagatcccgaggatagcgcacgcaccagcccacgcttctctctctgaaccttgtgcatgcgcagcctctctctccacccttatctctttttattttccttccttatcttcatcctctccatccttctccttccatcctccccttctcttctctcaccccctctcctcctccccttgcagaggcagccggcgggggcgggatggaggccgggcgcgggctagcggcggcgggatggaggtcgggcatgggctggcggcgggccgccggtggcggcgggatgaaggccgggcgcgggctagggctggcggccggcggtggcgggatggcggccgagcgcgggttgaggctggcggcggccggccggcggttgcggccgagcgcgggctggggctggcggcggctggccggcggcgacgggatggcggtcgggcgcgggctggggctggcggcggtccggcgcgggtcggcgggatggaggccggtcgccggcggcctcgccccccccccctcccccagatccggccggatctggagcggcgggatgggtggccggccggcggcgggatgggaggccgcccggtgagtctttttttttgattttttttatttgtggtttggatgtttttatctgtgattgaatgtatgaatctgtgatgtggtgactgagtatgtgactcgatgttgttaatgaacctgtgaatcaatattgtgaatatatttgtgatgttgtgaacgaatatgtgaatgaatttgtgatgaatctgtgaattgtgctgtggagttgtgatgtggatttggggttcaatttgacgatatgcataccactcgattcgggagaaaataaaaaaaaaagcagaaaagaaaaaaagaaaaaaaaggaccagctagactgccgctaccctctctttaatcccggttggtgttaccaaccgggagtaaagatccctatctttactcccggttggtgttaccaaccgggactaaagatcgatttttagtcccggttttttcacccgggactaaagatagcgatctttagtcccggattggtagtcccgggttgaaaaccgggactacaatggggttacgaaccgggactaaaaagcacttctccaccagtgtgagatgcgtttaaacatgttggaacgcattaacatgaattaaaatatcaaaaatttagggccttagtttttgggcccagttcgcccccatgcatttcgcacaccattaatatattttcgtcagagatgttgagataaaaactcattaattatttcatttattgattatagacatgcacgagtgtacacggtacacacacaagccttcatacattgatcaacaaccaaacaactgtatagggactggctataaaacacatcatcatgtatagatatatatttagcaaacccggacccgggcatataattaaatcaatcaaacattaattcaaactgtaggtatatatatacgcgttgcgtttttttttcttcatttttgtgagagatccacatcaaattatactgtatctctttgtcttcagatgcagcaccggtggcacttgccgtgccagtggcagcacgagcccttgatctgatgatggccacgacagtaacgcatgcacttgccggccggatagtggcagcaaccccggccgtggcagtcatggccgccgccgccgccgccgccgccgtctgcatatgcatgggaatacgggatcagatcatcgataaacggtgtacacgaaaattcagttgacgcatgcatatgcgtgcagtgcagttaattagtgtgtatcgaaaggttaattcgatcgatcttggcttttaattcactaatgagatgtaattactatgtatatattcgttccaaaagtattgtaacccattttagaacaacaaggtagcccgcacattcgcgcgggcatgtgttatacgctaagtttgagatactatattaaccagacaatatctcacagtttctctataaaatggtttcgtggcattaattgcttttataattttataacctattagctttatgttatatcatatttaattaatatctataagtagttatttataatcttataatcatttgaaaagaaagtagacttattttctttagaaaacatgtgagcgtaagtaaaaataagtgtaaagtaaaagtaaattgtttttcttttttaattgtatatatataatcatagtttatactaaaggatgaattgggtgggacatgaagctccattaaatgtatgtgtttatatagcttaatatgatttatgtagtttgagagacgatccatctataagcatttcatgctgagtgagatgttccaggcagtctaacatgaatacgaaatgataaaatataattgcccggtaatatttttgaaatatgatgtaccatgaatacacgcttgtttttgtatatatataagatagatctaatggttagaaataatggtttcactggtttaaaaggcacatgagtattccatatatggagcttatggttgttttaattatgtagttggtgacttatgaacgctctggaggatgttcaattaatttttgttatgtgcaatgatttagtataatacaatacatattttcaattaattttcgtttttatttagtgtccatgcaaacgatagggtctaccttcaaatgatgtattttaacttttatacagcaaaatatagctaatgacggtttaattataaataaaactatagctatgacagttttaatattatgttacttagaaaaaataaaagagaagataatagaattggagaggagaggatgcgagagcaagagggggaggatcaggtggtatacataaggcatgatgatgggaggagattactttttttaagatagatagaatgggtcctatagttttgagttatctatttttataaatacatttaatcatagatataatataaaatataaaatacttgggttttgtattttataattaaactgcttaaattgatttgattttagtgtgtattattaatcagaagctttataaatctatttaactttttcttaaaaatatatggataagtgaacaattcttagtctgtagaatatatatgacccaaagtaatgcattttttttaataatatagttcatttggatcttcaatttaaaattttatagtaaataatctagcggtgtgcaccaaaaaaatagctatatgatttagataatatagttgtttaaaatttgttatcataacatattttttcccatctaactaaaagacaaaaataagagagagaggaaatatgtggggaggtaagttacgcacgtaaacgggagggggtgggatatgctggccttttttatcctttcatatttggataaatcacagtgaaaagtataactaaaagagaaaaataaaagagaaaaatataagagaaaggaaatatatgaggatgtacatcacatgtatgtacgggaggggtgggatatgcgggtcttttttattcttttctatttgaataaataaatttagtgatagaaaacaatgggtcacatgaaaatcaaatatttgtgattgttctaatttattaaaatgtcaagtgacaacatagaagtgtttataggagtatatataacggctcgagagcgtttataggatttttaatggacttttagtatataataaatcgcaaaatctatttcgagaggcatctcgatttagacttaatgagcgacgcggacaattacgtgaattacgtgagaattactagtagtgttacagacatgcatgcaagtagtttttgctattaggttgtgcatatattttttcttcttataaaattttctcttaaattacttatccgatctataatccgattacaccgttgtgttcgtaacaattaaatctttacgacaagatctcacatgattatattttgatgaaaaattacaaattacttttatgatatgtctaaattacttttaaatttcagtaagttacttcttagacatacaaaagtaaattcagtaaagcctaaaagtaatttacatatattatagaagtaacttaaaacaaaacgaatgcaactttggtatgtcatttgaagtaaatccgttgtaaagataaaaacatgactctatctagaaattaaattaatcagcacaaattatgaaattaactaaaaacaataataaaagtaatcacctcagagcattataaatgtataggaagtattttaatcaaatctaaaagtaacttatatatgataattatatatatgataatttgttcaatgaaaaaaggtattaattaaagttactttctttttgttataagttacttctataatatatgtaaattaattttaagttttaccgaatttacttttgtatgtctaagaagtaacttagtgaaatctaaaagtaatttagacatatcataaaagtaatttgtgatttttcatcaaaatataatcatgggagatcttgttgtaaagatttaattgttacgaacacaacggtgtaatcggatcgtaaattggatgagtagtttaagagaaaattgtatttgaagtataggtggatggtgtctcttataaatagagtaccacaagctgtgtagtcacgtccaaaaatatatatattttttttttgaaaaataatctatcttataatagatgtatgcatagctcttataaacccagaaggactttccccggtcagctgttcttgcaagagccagtggttcgcatcctttggccatgtttatgtgcagctggcgagcaaaaccttctttgctcgtcgctagagcaacacggcaaaaagttttctactggaatcctttaccaggttgcgctaattaccaaagcacatctgttactcgtggaaaagtgagaatatgatttagtattatggagttgacccgaagatatatttcaattagttccgatcgatttgattgtagaaaatgaaccgaagtttgatgatagtatcatggagataagacaaataacaaattcttaatcgtcttatcatctaccgcttgatgaccacatttttccacgacctgcagattttttcttttttgaaacttcatcgctgagtaagagagtttttttagactgactaattaagagacttgggaagaggaaagatgggagagagctcgagaagttgaaacgggaggggagcagagcgcgcacatgcgcatgggaggggcgaggtgtatgggatttttttttaagttaatagatatatctaaatctaatctaatggttaaaaataataggacgatcaatttaagtggaagccatgttttgtgtttttctcagaatttttaggatttactctaatttattagagcgccacgtgtcggttttagagcgtttgtagaaagtttaatggacttttagtatataatatatatgttgttaatattatcgggtccaccgctttaaatgaaatttaacggttagatatttttcttcttcaatcaaaattttgtacgaatttctctaatttattagagcgtcatgtggcatcttaaaagcgtttgtaggagcgtcacgtgacgacttaggagcatttgcatgagttgtactcagttgaaacctcaattatagtttatcatggtttaatagttctaaacttcgtgattaatgaatatataattgtcctctgtttggtttcttaactatagaattttcatgattaaatgatttcgaaatttggaattattgagttgtatttggtttaaaagttggcccttttaaagtagagtcgttgcgaactttgagaggagaaaataacacttatcacagttggagaggttggaggaagacttccataatccttgtattgctatacatacatcatcaagtatggagagttgcccttctacgtttcttcagattgacacattaaactacttttgtacaacctaacgtgcacaactaacttcgagagaaacgtacaggtggattagatggtggcccacaaaacgttttagaaaaataagtgaaaataaatctaatctaacggtttggaatgttgggtccactaattttaacgaaaatcaaaggtcagatatttagcttttttctcatattttcttgtgccatgtgacgacctaggagcatttgtagattgccacgtggcggcttaggagcgtttgtaggaagtttaatggacttttaatatataatagataatagaagatagatagatagatagatagatagatagatagatagatagatagatagatagatcgatacaacagatctgaacggataggtaaactatatgcagtaatgatgcagctgctcacgagagtcctcggcggaggcgacgtcgatgaaagcagcggcgagcaggagagtgaacactagcaaattaagctgccttggacgccatggctgcaaggtagtaggttaagtgatcttaatttgtatgtttgtatgtataaaacatgcacccactagatatatttataggtgcaaaactgtaaattaaatggatctatatatatatatatatgagccaggtccgtttgagtataggaaaagctttagtttttagtgccagttggaattatcatattcataatgaccgactcaatggttaagaaatactccctccgtcctataatataagggattttgagtttttgcttccaacgtttgaccactcgtcttattcaaaattttttgaaattataatttattttatttgtgacttgctttattatctaccgtattttaagcacaacttcacgttttttatatttgcaaaaaaaatttaaataagacgagtggtcaaacgttataatcaaaaactcaaaatcccttatattgtgggacggagggagtattaagtttgaatacatagaattcgacattatatacttagtgccatctgagccgtcaggttgaagcgctcacggcatattatatgtatgatgcaagcatgcttactgtattcaaatatatgacacaggactgatctacaaaagtaaaactagataatgaactgcaccaatgctaatgaattacaacatattcggtaaaaagactatcattagtatgctacatgaacgtcaaatttctctgggaacaggccagttagcgtacacgtgagcatggaatgcaactaattgtcagcgagggcttcctattagtacgaattcgtctagctatcgatcggcactgcaatctagcaccacctatcaccatgctggcggatcttagtaaaacccacaaaaatctcatgtaaaggttccacgaaattgaagagttgacattaagtttgattgctgtggtttttttttttgttgttgaaagtttcttatactgaatgggaagagttttactttaattgaaggtttccaatcattctgaacagaagaagttgtactctggaaaagtctggataagtgttgacgaagaattcacgctcaaccgatgatgccaaatttgtgttggagcgaactaagtcgacaaacacaatggccagaaagatccgtttagctttaatgcaggtcctaaactttaatgatatgcgagcgtgccagttagtttgatgctataactaacaagatatataaatataagatcaaagaggcgatcgactggcaagccgatatagcaatactggccgatgtcgttgccagctgatgtcagccatctctagcatcatacttattaggatatggtttttcatctctctagtaaatatctcgtaacttgcacatcatctactccctccattttaggttataagatgtttcaaagtcaaactgttttaagtttaaacaagtaatttatataaaaaaatagtaggggcaattccatccatgtccacactttcaaaaccaattgttgttttacccccgctttttagggtttgcagttttacccctactttttaaatctgaattagccgtctagcctcacttgtaacggccgtttggtgggacccacaatttatgttaaagaaatacaaaacgaaataaaacaaaggttgagtctgtgtcctccaccccgtgcgtcggtccctagcggcgagtgcgtgtgcgtggcgcagcggcggcggccgccgcgagggcgcgcgcgaggcggcagaggcggggagggcgtgcgcgaggcggcggccgcggccgcggcgagggcgggcgggagcgcgtgccgctcacaggcggtacccagccggagggcgggcacgcgcgcgcgccgctcccaggcgtaaccaagccggcagccgcggctctgccatgaatcgatgatgctgctcctgcttcggttgcggcaagttaggcggtcggtggtcgaagtcgaacccactaccgctgccgctgccagaacggctggattggtggccatgtgttctccagcgtttggtgcgttggtcatcaaccgcttctgctgctgaggaagcaggtcaccggtgcttgttcgtggacactttgtaatgcttgctatatatcgactgtgctagttgtatcaaaattatatcgaaatgttgttgaaattttgttcaaattttgtaattgcctagtatttatgatttttttttgttaaagtactaaaacatcacaagagatgctcttatttgaattatttataacaatcacacaagctgaaatcacgaaataggagcaaaatcataccaagctcaaaaaataggggcaaaaatacaataatcgccaagggtataaatgtcattttctctacctctaacaccgttaaaaccagctattataaatgggggtagacggcttattcagattcaaaaagtgggggtaaaactgcaaaccctaaaaaatgagggtaaaacaacaatatgctttgaaagtgggggtatggatgcaattgtcccaaaatagtaatatttttgacccaagataaatttattataaaactatatttaattattaatttaataaaactaatttggtaatgtaaatattactatatttgtctataaccttagttaaatttaaagcagtttgactttaaccaaagttaaaacatgttataacctgaaacggagagagtatttcagagaaaaatactttaatagtccggcttaagaacaggttagtactaaacagcaaacaactcctactaattaagcattagaaacagaattactgaagcttttccattctttaggaggaaagaaactgtcttagattgagtggcctagaagctaaactgtaaacgtatatacttttgtcttgctcttgagaaattcagagatattaacatgttctctctctatataattttactacgtcaattatcatgcttcttcagtcctacttggtgttaatttcattatcatttcacagtctatataaaacacactactacaaaaacaatttttcatagcaccatccttttatttttactgatcggtttaatgactacacacttgtaaagatacttgagagagattccggtcatcattttcactggctgtcacttaagagatccacttgcaaaaatacctcactagcgaaaattggacggcgtataaggagcaccgattgaaaaaaaagtcgctatattaaaaaatcacccatctcacccctcctaaaacttcatctcctcttccccaatctcaccccctccccaacccccacaccctcagcctctcctcttcatctcaacagcgacggcgactcaaggggtgcgggcggtggacctggccatcggagtgctacgggtagctaacccaaccgcgggaggggcgtgggcggtagacctggccaccggagtgtcacggatggtggattcagccgtgggaggggcacgggcaacggatccgtggccgggaggtgggcagcagcggtgacggtggaggggacgaatccagtggtgagcgatgcttgagattgctagatacgcctcctcgacagtgaagaagtggggcggttgcggtggatctggcgaaggttgccacgacgatgatgacgacagctggtccttgagaaggtttcggcggctcctccacccactcctctctcctagatccagtaggcggcagctcagggccatggcggtggatccggaggcctggggtggtgaggtcaccataggcggttaagctcggtcgtgggaggtgggcggcggatcctgtgatggctcagtgcacgggcggtgcatctggtggcgaagctcaggcgtgggcggcggatttagggagctccagatcctttgggtggcggcggtgctcggtcttcgtctcggtgatggcgacgattaccgggagcgacaacgatccaccggttagttcgtttggagatggggactgatccaattgaaaacccgtgaatagaaatttgtgattgtaaattgtgatgatttatggatttgttaactttgggaataatatatgtggaatttttttaactttgaggataacttatgtggattttggcattgatgagcggattcttttttggtgctgatggttgtggaacgagtggtgtcgctctgtcattttttcaggactcgccagtattatcgtaggcaaacaatatgacgtagccgcttctgcaaattcatttttaccggaggctaccatatgaagaccgctagcgaaaatggattggcgctggcagttggcgtaatatttaattatcacaggcctactttggttgccataaaaaatcattcttatagtagtgacattcccatcactttccaataattaaacgcttgcaagcatagtagatttttatggttgtaatttactccctctggtcataaacattgacgtttaggataagatctttaaatttttaccttcaactttacattagaacaaataagttttctgcatcatgctaaattgaattttagaattagaacaccaatctctatcaaacaacgggagtataatttttagtttttgtttccatagatgcaaatcctactttatatggaacagatttggcatacaattcacaactcccctcccctatcttttgaattgtattttgcacataattatatcattttgattaatatacaactttataaacctggatttaccacgatctcatggtaattttgtttcttttcctccttttactttgattaacatgagaataatttatagacctttagaacgaacttgtagtatctctttttagccgtcctaaaaatatatatcagataaatttatagaatctaataagattatgatattatttttcaagaaaaatctatgcatacccttcttttcactaagtactattgtataatactgatttcagaagtcatttgatcgaatcttatactgaacatcaaatatcattagtggaaggaaatccgatcttactatgaagttacaacccactaaattttaaagcttaacatgcaaagataccacatcattatccactaacaaacccactaaattctaaatctcaacatacaaagatatcacatcatcatccactaacaattattacaccttaaaacatcataccaatatgctatattatctataattctataatttattatattttagagttttaaaatgcaagcatgttaatatttcaatatatcttcatcgtttttttataatatcctatatacctatatagttcatcatcagttagttaatgtagttatttttttttctctcattaagttatattacagcaattgtttttagcacttagatgattaatctgtggttaaaattaccgacttcattttcttctctcattaagccatatcacatcaattgtttttggcccttagatgatttatctatggtccaaattacctaccttcttttcttctttcataaagctacaacatcttatttttacatttgaatcatcattatatatgctacttaaattatcataaactatatcaatttacataagtttatatcatctatctatcttatacattatttatactaattaatatcatactaaactcccgcagcaacgctcggggtttcatctagaactatttaatgtgtgcatgcatatatgccatttgcatttaactatttttcgtaattctaaaagtacgagtttcttgtacttattgcttttctaaggtaaattgtagggcacaacatcttagcgactaagatacaattcaaaataataaattgaaaattgcacagttttattgtaataacttgataaatgggtgttaattagcttgtggatgaaatcccaagaatcacgctttcgagtgacaaatgagttggtttacgagatggttaggcaatgatataaggtgtagcgaattcttaaaatacaagcgtgttatggcttcgtgtgacgaatgacaaatgggtgtgttagcttgattcaacaagtattacggccggttgatcataaattttccataggccgggccaggtaaacacatgcgcataaattactctaggtcgtcgtcgtttgcacactctgaatacaaggaattacatcatagtaatgagccggcagggtggctacctgaggtcatcgcgagacctaattggatcctcccctgatattcatttggtagcactctctgaaggagtcataaactcataacaagtatggtagatagatatatatctatagaagcattattataacgcattttattatagatcagcacaaattacaatactacaatacctgacacgaccctacgactgacgacaccaaaggcacggattgttgcgtacgtatagcccttgtataagagcatatacatagtagcactagccgtgtgtacacatgtacacacagcagagatcgatgcaatcctttattgaccaaagcaaacaactatagggagaagtagctggacaagcacatcgtcattcatgtatatatagcagatatatatttgtataaggtttacgtgcgtttaatttgccatcgatccattcatcgtcttcatgagcagcacgaatggcacttgccccatttacagcatggaccgctgtcgccgctgcagtactcgtagcacttgtcatagtggcagcagcctttacacttgcaaggcccgcacttcttgccgtcatgatcgccgtgatctgcatagatgggatctcgaataattaagcttattacacggaaattgattcatgtatatggtgatacggagagactgctccacacctccacctccatctgatcttttggagctacagtccacctaaacagtttcagctctacctatttcctccatccctaaatataaggggttttggttggatgtaacgtattctatagtacaatgattctggatatggaagtctgtccagattcgttatactaggatgtaccacatacaaccaaaatctcttatatttagaaactgagggagtaaaatagaagcggagctgggtggaccgctcttacaaaataaactaaaaatgtgaagatgggtttaggctgctctacaacttcactccagacccaactcttagagttaaatttattagttgaaactctaccaaatcgacctggagtatattattatataatgtgtgtgtacatatatatatatatatatatatatatatatatatatatatatatgtatatatgtatatatgtatgtatatgtatatgtatatgtatatgtatatgtatatgtatataggtaaattaactggtgctacatggagtgtgggctccaagattcaaattgagtatatacccaatttgaattagtatgaaatttttttaaatgtttagatatgaacattaacttctttactaacaggttcaaacaagtttgaactgagtttaaactttttttttttgttagattttggttctaggtatataacatccaaacatataatttgttaggtatgtaataatgaattgtgaaataaagttgagtttgagtggttttgttgttaggtatttgtatgaatcaaattcatatacctaggtatatactcacaatttgaaaatttttaaaaatttgagagaatttgtgtgttttataccttagagcccgggcaccatggagtcccatatgtgtatcctatatatatatatacgtatatacacatatgtatatgtgtatataagtatatatacatatatgtatatctgtatatacacatatacatatatgtatatgtgtatatatgtatatgtgtatatacacatatacatatatgtatatatacgtgtatatatatatacgtatatacgtatatacgtatatatatatatatatacatatatacatatatacatatatatatatatacacgtatatatgcgcgtaccaaaaaaaacgcatatatatacatcatatatatacaccagaaaagagaggaaagatagaaacgcataccacaaaaacatcaaagcatcatgagcaagtgttaagcaatgcaagtagaagctaatatcgaacacgaaggtatattataatctctctccgtctcattgtaagtgcatatatggttttctgcgttcaactttggccgtccgttttatttgaaaaaaaaagtaaaaacataagtcgcgagtaaagtattattcatgttttatcatctcataagaaaacaaaaatactaattataaaaaaaattaaataagacgaatgatcaaggttggatgcggaaactgatggtagcacctaaaacgggacggagggagtattatatacgtattgatgagtatcgatcgattaaatattcgatgttagttcgagtttaattattccttgatgttataaactgaattatgcatatgtatatatgtagtgtagatagtggtcattaccggcagaggcgacgtcgacgatggcagatgcagccaccagcatcaggagagtgaacacaacgaaagccttgttggacgccatttttgcaagctagctagttgattaatcagctccctcgatctcacttacgatcatgtgttttgtgtagtagatggcatgcgtgaacttggcctatttataggcggaaaatggcttctgttccaaggtacgatcagcctttagtcgatcccgttgacgttatcacacatggaccgattcatggcgaagaaatattaagttgactgtacgtagcattcgtacgacattaattagtgtgtgattatttttagtcagctagttcagaacgcacggcgtctatgtgataagttgtgcttagtgcgtattgtaattaaaccttactccctctgtctctaaatatttaacgctattgatttttttaaatatatttgaccgtttatcttaataaaaaacttttctgtaatataaaaaactatatatatatacataaggaaaaagaacgaattacccccctaaacaatcatgacagtacgaattaccccctaatctcaaaaccagacatttgatactctaaactattgaaaccggataaattaccctcttggctcaacccggagtggttttgctcctatgtggtacacacgtggcaccagggtggcgatccaatcacaaagaaatgtttagaaactatgggcccacttgtcatctactcctacctcacccctctctctctcttctctctcatccgctagggggcacagcgggcacgccaaggagggcgggcggcgacggcgaacgcgaagcacagtgtcagcgaccgcgtccgcagcagcgacgcacaagtcacccaagatggagctttgcaggaggcggacggctgcagtgtggttcagggtgagtgatgtctagttttcaggttcagggacgaaattcggctgacgacgatagttcaggggtgtaattagtatttttttaaaatgatagaaaaagaattaataattacttaatttttttaataagacgaactgtcaaacatgcactaactagacatatttataggtgtaaatgaatctatgagccaggtccatttgagtataggaaaggtttatgtcctgtttagttcccacataaaaattttacaccctatcacatcgaacgtttgagcacgtgcatgaggtattaaatataggccaaaaaataactaattacacagattacgactaatttacgagacgaatcttttaagtctaattgctccatgatttgacaatgtggtgctacaataaacatttgcgaatgacggattaattagacttaataaattagtctcgctgtttactgacggattctgtaattagtttttttattagtgcctgaataccacatgcgacaccctatataatacccgatgtgacacgtcaaaactttacactcctgtatttaaacaatcccttagtttagtgccagttggcattatcatattcataacgaccgactcaatggtgaagaaattttaagtttgactccatagaattcattcgacgttaattagtgccatctgagccgtcaggttgaaaagcactcacggcatattatatgtatgatgcaaacatgcttactgtattgaaatatatgacacaggactgatctacaaaagtaaaactagataatgaactgcaccaatgctaatgaattacaacatattcggtaaaaagaatatcattagtatatgctatatgaaaatgtcaaatttctctaggaataggccagttagcgtacacgtgagcatggaacacaactaagtcagcgagagctccatattagctggggaatatatacgtctagctatcggcactgcaatctagcaccacctatcaccatgctggcagatcttagtaaaacctacaaaaaatctcatgtaaaggttccacgaaattgaagagttgacattaagtttgattgctgtgggtttgtttgttgaaagtttcttatactgaatgggaagtgtattactttaattgaaagtttccaatcaatctgaacagaagaagttgtacactggataagaagttgtcaattccccgtaaccatttttttccctcgtgatgaacgtacttgttgctgtaggttttattggtgaatgttttccctcgtggatcttactgaatactccatctatcccaaaatatataaataaatttggttggatgggacacatcctaacactatgaatctggacaggcttcactgctcatattcgtagcattctcatccaaccaaaatcgtttatattttagaatgaaatgagtatatatagtttacccttgatcttgatgtaacagcagatgtgattatgttggtggcatagctagcagcttattgagatctcatagcatttgctccctcatgtgaatatagagtgaattgccttaagcttttgggttaaactggtcggtgcatgtaactcaatatagtatcagagctagaaatctcaagttcgaatcctgactaacgcataattaaataaaaattgcagcacacttctattgcacgctagaggcttgagggggccttgtgtgaggggtttgttagacaaatgtatatccagattcatagtagtaggatgtgtcacattcaatgctagattggtttttttataggacagagtgagtagattgttgttgcatcaacaagccgagaaaatatatataattctagcttcgttaggcactgtcaggggctcaaagtttatgagtgaaatccggctttggcaatctttagcggatcaaggcacgcgacgagggaagcccgaagccgaggttgctggcaatgcctacaaagttggaagtcggggacgaaagaagaagcagcagcttggggcacaggaggtcgtcgatcgccatcatacccaggttctcatatttacggttaattatgagataatatatccaccaacaataaaatatttatgataacttcgttactctcaaagtatgccggcgatagcagaaacacctcgacatcacaccggtctttgtgggcatcgtaacgaagccttgaattggatatgttcgatctcgatggatatggatgccgctggcccatcacagtaggcccattttaaggccattgcctgacaaaacacaacaatccatttgggtcctcagctgggttgaaaccatttggccaatcgttacaataagtccactttgactccctgaaaagtgaccggaatctaattgatgaccctaaaccgcaaaaccggatatctcaacccctaaactattgaaaccggtgcaatttgactccctcggcggttttgagggcggtttcgctgacgtggcggcgatgcggatttgcggatggatgcggggagtcaaaaccgccaagggagtcaaattgcaccggtttcaacagtttaggggttgagatatccggttttacggtttaggattatgaattagattccggtcactttttagggagtcaaagtggacttattccccaatcgttcgttgggggaataagttcacaggaggtccctcaacaacgtgattttttttaaggtcccttaactacaaaatcagaaatgtgtacccctaaactcactcaaaccgttcaaaggaggtcccttggcagtatttttgcccggttttgctgatgtggcatcgtagtcagcaaaaattttaaaaaaatgtaggacccacttgtaagtgagaaaaatgtgggatcaaccatcctagttagcaatcttcttcttttttcctttttctcttcttctctttcggttttagagggggagcggcaacggcacgtggtcggaggcaagcagagcagcggcgtcggcgggcaggcgcggctgcagagtgtcggtggcggcaggcggcgaaaagcggcgagcgagcgtggtcgtagagggcgagcggcagcgagcggcggtgcgcggccgaagcaggcggagaggtggcgtcagcacgcggccgaagcaggcggagaggtggcgtcagcacgcggccggagcaagcggagcggcggcgtcagctggcgagcgcagctgcggcaagtggcaggtgagcggctgctccgggcgcgggcggagcagaggggcaggggacgcgggggcatggcgggcgagcggcggcgaggtgccgcctctttcccctttcccgccggcctcatcttcccccactttgcccggcctcttctccctctctccaacagggcgcggggataagaagtacagtcgttgtcgtgaagccgtgaagccgctcgcgtgcagtgcgctcacatcgttgccgtgaagccgcttgcgtgcagcgccccgcatcataccgctccgcgctgctcgtccaccgccaccgccgccgccggtacgcgctgcccccggttgctgccgccaccacctcaaagcccatccttaaggtacgtagggggatcggcagctggcagcgggtgagagtggcgacagcggcaggggaggtcggccgctctacccacagcccaccgccgctccgcccgccacccgttgccgggctcgcttaccgccagcctcctaggcccaccggctctccgcccaccgcccacatccgcgcttgcccatcgctgcccgccgttagcaaagagagaagagagaaacgagaagagaaggagaagaaaagaaaagaaaaaaaatgtgcagctgccatgtgggccccacataattttttaaaatttttttgctgactaggatgccatgtcagcaaaaccggacaaaaatactgccatcggacctcctttgaagagtttgagtgagattaagggtgcacatttctggttttatggttaagagacctaaaaaattcttgccgttaagttgagcgacctccggtgaacttatagttgggtagctaccaatccaacctggcccatcagaatttgggtcggtactaatggtacctgttcaatttggcccattagaatctttaacttgtttaccatcggatccaattagcccattagatctcgatttaagaaagggaatgagttcactttaggtccctatatttgtcgcccagtctgattttcatcgctgaaccgtaaaaccggatacaacgcatccctcaacttacaaaaccagtgcacataacatcctaaggcggtttggatagtggttttggctgacgtggcgcctacgtggctggtttgactagttctccgtcccacgtggcattgacgtagcgcttacgtggcaattatatctcgaaaaaataataaaaccgcgggcccacatgtcagctacacaaaaaaataataatttaaaaatggtggggcccatgtgggcccacatctcagttacaaaacaaaataaatagggtgggccccacgtgtcagtctgtagcgatttctttctccccacttgaccatctcctccaatctagtaatccccatccgcggacggcagttgctgcggtgctggcagcgcacagcacacggagggtaagcggaggggagtgggggcgtggccaggctctcggcctccggggcgcagagctgccgcggcgtcatctgctccgggcagcggcgcagcgtggctagccgccagggcccaggggctcagccgctcaggcgagcggccacgcacgcgcatgagcgtagcgcaggcagagcagaggaaggggcaggcaaggcggagggcacaacagcagtgcaaccgtgcagcaccaagcagcagcaacaagcaagcaagctaactagccaagcttccatcactcaagcagattgaaattgtgaactaatagctctgtatcttattaacctgaaataatggactataattcgatgtttgcttcaagaacctacatccacacctttacatactcaccagcgagcgacggtcaaagaggcggtgctggtacggtggagccatgggagaggagcggcgtgtgactgcgactcggcggcaaccggctcgccggcctcctattcccactctcccgccagcacagccggccgccgtggtatcctcctcctcctccgcggtggcggcggtgggcggtgtcgagctcccgtccgagccaagcggagggcgccagcctcgtcgtcgtcgtcttccggcgcgcagcggcgcgaagctggctgggcggggcggagcgggcgggcgaacggcggcgcgaagccgacgggacggagtggggcagcggcgggcggacgcgccggcggagtctccttgaggtcgtcgtccccggcaccgccgagactgtggccagagaggggataggggaggaagaagaggtgggggtgagaatgacatgcggggcccacgtgggccccaccatttttttatttatttgtgtgtgaaactgacatgtgggtcccatggggtttaatatttttttatcgaattgccacgtcaccgtcacgtcaatgccacgtgggatgaagacctagtcaaaggagccacgtatgcgctacgttagccaaaaccgctctccatactgccgtgtgccgagggacctcgtttgtccggtttttgtaagttggtaagttgggagacgggttgtatctggttttgcggttaaggtatgaaaatcggaccgaccaacaaatagagggagctaaagtgaacttattccttaagaaagccactttgaatcccgcaggcccggtccacgtgaaatctgtgccccgatctgaatcgccttcttaatctctacatgtgcgattttgaagtgatagcgtgcgcgattttctcttgaacatgcattgcgggtcttatttgtctgcctcaaacttttgtttttttatctgatgcatgccttctttttacttgtactaccacttgatgcattggcgataactgataattcatcacgcagatagatgaagatgaatcgtccagcactccgatgtatacaggtcacagaccactatgcacaaatttcacttgtccaatgttaacatccatggggcgcatttgactgtggtcttatggattacttcttccacaatgtgctcacgacgtatgtatgatatactatgacagtgcgtggtttggattatttctccgaaactgctattaacttggacaatcaattgtttaaatttctggtaacgacgtcattagttcgtagattaaggggctcgaaaggtattttaggagtgtattataaaggccacatcatgatcaatgatggtatcgttgaagtggatttggttctggtgcagtacctagtgtgacaccaactctttgacgcaaattaatccaagggtctaaaatatacaaagtactgtttacacgtcaaaaaaattgttgaggtaatatagcatcatatctcaaccgttcacgaaaaaaatgatagcatagattatgtgcagtttctaaattgcagtcatagttaaaactgtactagatctcaattcctggatccggtatagtccctagtgtgactgcaacataagcagtcatacttggactatttgatgcaaatctaagggtccaaaatctactaaggactgttcatatgtagaaaaaacggtggaggcactttagtggtagcactataacatcagatctaaggggttgtttggttggcatactcacattaccaaaacttgccatacttcatttagctaacatgcctaacatgtggccaacaaaattgaagctacacttcagccataggagagtaaacttgccacacttttatgtgccaatgacatgtgggacccacatcatggagaaagaatgttgccaaaagtgtggcaccaaccaaacgaatgcttaactaagtcaaacctggctaacttgagttgtgtcatgatgaggcaaattgtggtagtgaaccaaacaacccctaagccattcactaaaaaaatgatggctgagattacgtgcagttcctaacttgcagccgtagttaggactgtacaggatctcaattccgttgaagtttgaagttctctgaactggcagctccatggaatgtgatttgcatagtacaatctacatcagtttttatatggttaggccttaattagttgggtaaaatttttaggtttggttgttacatcagatatacggacatatatttgaagtattaaactagtctaataacaaaacaaattacagattccgacaggaaactacgagacaaatttattaagcctaattaatccgttattagcagatgtttacagtaacaccacattgtcaaatcatggcgtaattatgcttaaaagattcgtctcacaatttacacgcaatatgtataattttttttcctacatttaatactctatgcatgtgtccaaacatttgatgtgacagcgtgaaaaattttgttttgataactaaatagggccttagtttatggcttgttgatggattgactctttatttatagaaggttgtccccatctgaagcaagaatatagtctgaatatcgagtctataatcctcaatgcactgttttttttcgaacggccaaacaggttgcttggcgttatattgatagaaggagattaagtacacagcaaagctgaaaaaaaaatgaaaaactgtacattgctgactgcaaacatgcttgcacgtcagaccaccttgcacctcatggcaacaatctcgcaacgtgctttgcgtcagccaaactccagcagcccaactcgtcctgaatttggttgattatttgatgggttgtcgcctccttgcctctgaaggttctcacatttctttctctccagatttctgtaacgctccgcttttcgtgagacgttaaaaattaattctgcaaaatcctaattgcgaaaatttcgttctttgtgtgcgagtctaagtcgtgccatggatctcaattcaatctctcattgttccctctcgtcgctatcaaaatcgcccacctcaagatttcaattccgattcaagtctccaaatttcaatcgcctgctttgaatccttgccgaatattcgctccgactacaaaaatattcaattcccgttttgaatccattccttgactccaccctatgttcctaaatatcatccttgaattcaaacctaaactccaaattctctccaattcaatctatctgaaaaagtctagtttgcctccctctggcttgtgggccgtttcttctcggcccattttccccctgcctatcccctccctcagcctcgcacgtgtgttgcacgcgccgagccgagccgagagatcgctctctcgttctctctctctctctcccgctcgccctcgctcctcgccgcgccagcgcctcgccgattcgaaccgccaccgccttcgcgcgcgctcgcgcgtggccgaccggccagtcaccgccaccgtcagccctgccgcacctgcgccgctcggccccgcacccccctgcgacgcgtgcccggccgctccaagccgcgtgcgtccaactcccggaggcagagctctctctccctcctcctttctcccagaatggcatgggcagagccccctttcctccctccccttttgctttttccccgaccggcaccatcgcctcctcttccgcgcccgtgaccacgctcgaccgccatctcccgcccttgaccgcctaggtcggtttcctcccaaaccgacttcaccacccctataaagcccaaaaccgagccgccccatctccctctcgttcatcccctctctaccgctgcagtgccatcgccgccttgctgccgccgtcctcgcctccctccgccatcgcgtgtgccgggaagccggagtgcgcgaggagccgaagaggactccggccacccctcttcttcctcttccccagcccaaggccggagaactcgccccgcgccgtcgaccgcccatcactgcccgcccggctcggtagtgcctcctcccgttccccttcctcgctctccctcgcctcctttagctcgcacagaagctcggtagccgtcccgaacgcgcatagacgccgccccaatgcccgctgccgcccggcatggccacgccgccattgccgcccgctcccggaggccgcctctcgtcgttggccctcctcggtgcctctcctccccatccggcgccggaaacggattccccgagccccggagatgctcccacccctttgaatcgaactcccgtcgctccggtgaaatttccccttttgcttgccgccggtggccgccgtcgcaatccgccgcccttgacctctcccggcgcgatccgagccgttggctcgtcctctcttgcgccgctcgccaatccggtgtgctcccccttgaccatagtcatcttgtcgagctccggagaactcggccgccgcccgccgtccattttcccggccggcctcgtcttcctcctcccgccgacccgcgtggctgccgccacgtcggcgccacctcggacgcgaccgggtcaaggctgaccccggtccgccgctcccctccgtcccgctcgcgcgcgcggtccaccgcgagccgtgaggctgtgtgtgggcccgccacacccgcgtccattgcaagccgcgcgtgcgccgcgcctccccctcccaaaccctagcgtgctccgcgtgcacctcgctcatggtgagccgagccgccgacaagcgggtcccactcgggaccacgcgaggtgagcccggcccaccggccctctccctccctcactctccccgcgcccccttgggccgcctctccgggccggccggcccattagtttggccgagccgtgcctctcctctcgggccgcacccaagccgcccgaggaagtctaaatcatatccctccttcaatttctttccaaaaagggtttaacaaattattaaatcctttttcctttagacagaaaattccttaatccttagaaaatccatatcttctcaaccgctcatccgattgactccgttccacttccagtaattccgtaaaattgagatctatttaatggcactattatttagtctaaatagggtatttttcttggtcttttgtttaggttttgattgtttgcgtatagttgcggttaccggattttcgtcgatcgcgggttttctcgaagattcgtgaagcttcgtgaagaccttgagcaaggcaagtcaccctttgatcaattgctcctataattggaaaatcattattattttgtttgcaacttgtattattagaatcacacacttaacttgcttggcctcggtttgcatgccaaaccgacggacctacctagtagtcgcaccaattcctgtaggctgtactaccctgattccttgtcgctccacccttgtggtacttcggtatccgtgctctctaagcgcgtatacctaatatcccacatacaccgttgattgtcgaaaacttgggaaatgggtttgtgaagccttcaaaacccgacatgtggtgtcggtgtgttcgaaaataaaatgaattgtgaaaactcgcgatgcgggggttgtgcctatgtggcactgtcccgtattcgcatataaggaccgattcctgtgggaaactcatcgagcataatcaaagtgcaaccacaaggtggaatgggacaccctggctaagtaactagtcggttcagggaaacctcgcatgccaatagttgggaacgccggggcggggtcggacaaaccgggttcatggtaaggcaaggacaagaagcttgctgacttaccgatcaaggtggttggagtttgatttgtgaatgcctaaaatggcctatacttacgtgaggatttgatccttctatgtggcatgaggtaaccctgggtcggcttgggaaaggctttgtcgcgaacctctgacaccggccagtgtctggagtaagttcgtgtattgtgggtaaagtgtacccctctgcagaggttaactaactgttcgaacagccgtgcccacggtcatgggcggacgtgaggtggttcccgttgcgtagatttgtttgcctgtactttgtgaaaagttgttgtggtgtgggaatcgtaaccagaatcagcctacgtggcagatggatgacctgagtggtcagaaacgaatctgtgtgattcgggatgtctgcgggcatcatagactaggcttcccgagtggaagcggattgctttgctgctgggcaactggactctgggagtccgagaaattgaaaaaggctctggaagccgcctaatcaagtgaaatggctctgggagccgagaagtaatgatctgacccgggaggtcggtacattaccaattgagttgttgaaaagcatctcttaagtcgatttgagacgcaagtctcttttcgacccaaacttaaaaagaaataaatcacttagtgatttcaaaatgatttcaaacaaaagattcgcaaaactatcttgcctctcttccaagcttgcattaaacacctaagttcccgtgacttgctgagtacgaaagtactcacccttgctctatataaatatatatagttccgccgccctgaagttgaagatgaagtgaagtgaagattagggtttcgtcctggttcccagccgtcgcctgtggtgttgggtgttagttcgttggttccgctgcttctgctgttgttggtgtttcctcgtccgtgtcgtcggttgcattctcgggttgttctgagctgcaacctaagttaaggtaaataagtcctctatttattttaaggatttgcaatgattcatatttgtcaccgtgggtaccagcactatgtcctgggactggtaccgagatcgcggtttcgtaggaagcggttcgcgccgtttttcctacgacacgctcctatcaggtgccgttgtacgacggtgccggattggggtgtgacaatttcccaagcaactagcaggaaaactgatttgagccctttgtgttttgttacttctagatcgcttgttccttgtgtccaccaatccagcagatccctgctagtgctccacctcgggatgatgtgcccttgtcgtagccaatggagcacgccaaaccaaacttgcttcgagactgagcattcgaatagcaggtggttgatggtttcaaggtttcgaaaacataactggccgaagtagttgtttggccaccccctgatttgcaacatatctgctgtccatacccgattttgaatcgcaagccaactgaagatcttgcatttcgccgggacccatgcctcccaagacagcgttgccgacggcgaggttgtcattccctcaaattagaaaagataggcaaattttacgctgtattccccatttgccgtacatctctaagtgatcgaatcctccactccttctgtcaattgtgggctttcgagtgctaagacctcccagattttatgtattctgaaagaagggtgacagtgaggttgtgacggatgtcatttatccaccttccatgttaatgcactgttttgaatgtagacatcatatactgcttgatggtcagattgttaactgttaaaataaatccttcagaatctttagctgttgacggtatatgaactgcattaaatctaagaacatgctacgaacccctctgcagaacaccttaagttcttttcttttttgtatctattggctataagtttctcaaatttatacataactaatttaacttctgtgggagcctgtgaacttttagtatagacttcatcaaaaggtttcctcttgaacaattcgatttttgactcaacaaccaaaattcgacttttcaacacacatcacaatgttccaagattagcaaccaaggcagggacgcgtacgtggtcgtcagtttccagtaactcagtttggtgcgtggagtttactttgcaaagcgcgggtcgtcgcactctcgcgtcgcgtcgtcgtacgtggccgttccttgatcaaaactttctctgccaggaaattgccgcccaattgcatactattagtccccatcgtgcgttcacccatccaatattgcttaaccaaaagtcttgtaattttatcgcctatcaacagcagggtcacaataaagtttgagattgacataagctgccaaaatctttctccgaaccaatcaagtcaccaaaaaccgaacaaaaagacatgccaatattagcaatatgttctaaacaaatctatacatttatatgcagtacagttatgatataattacattacatgtaactataatataacttgtatcgttcattctaatcgttccgattcaacagatgcaattgcaatataacttttgtcgttcattccaatcgctccgattcaacggactagattgattgatttatttatacgtatgattattaccaccaccacgaggagctagccgggtattggtagacgacgtgctgcggcggcggcgcgtaaccgtaggggtagcaattccacgggtacgggtactcgacgacggcgggctccggcttcttctcctccttcttgtcctcgccgacggtcatgagcgtggcgtggccgaccttcttgcgcagcgcggtggtgagctcgatggagtcgacgccatcgccgaccaccaccaactggtccttgccgtccccggccagcgccaccgagtccaccccggtcgtcgacgccacgagcgccatcgccttcgaccggcacttgtcgctcgccatgttcatctttatcacaatcttttgctgcaaaaaccaacccaaccaaattcagtttcaggggctttcagcatgccacacttgctaataagatgtagtaaattactactactacattcgtcctaaaatataacaacttttagctataaatctggacacactattgtccagattcattactaaaaaatgcttatattttaggacggaggaagcaatagctagcaagttgtagtaattatgtatgtaccttggccattgctgctctcttgggaggaatgagatcagaggctgctacaattagcaaaagtctgaatggtgtaactgttcttcacttgggaattgaagctggagctctgttgtgcagaggacctcagcttggttagcttgccgtgcatgagggagagcagagcctgagaactcccctccttatatggctgtgtttgctaggggaggatgggaacatgcatagtgcgcatggaaaacgaagtagtccattagcacgtgattaattaagtattagctatttttttaaaaaaatggatcaatatgatttttttaaacaactttcatatataaattttttgcaaaaaaacacaccgtttagcagtttgaaaagagtgcgtgtggaaaacgagagggaaatgttgggaacaccccccttgcgaatacacccagtgtgccgctctgctagatatgtgtacgctgaacaattcagatgtggagcagttgggattttctgattttgtttacgacttggtgtgactacggtcatgtcagtaattaatcccattagtcacttggctgatcaatattgctgcagacgcggcacgagaaaccgtgtaagggcacccacaatggttatctatagactctctataagagatccatatcagcatattttcctacttggaagatattaaatgaagagagagagcaaaactatctactaacttagagatagtctatagagaaaaacgagacaatgcatgagagagctatagatactcatgcagacatactattgaggtggtttactattaatctagtctattgctgagatgtacatgttttatagagagtatcttactttaccattgcgggtgctctaatgtgagtatactactactgttgttgctgcttgtttggactccttaactgtattatacttggagcagcagattaattagtgaccaagcactctccttcctccttcctcccgaaggctttttgttcatatctccattaagacattaaactaatttcgcacaattggttgatcacactatactagtagtctagtaccatgccgtcaggttgtgcggttatgacgactgctgcgttggtgtcagcttggagaagtaggacacagggacgaacgttttcttccagtgattgaaagagtaaagttgcaacgcactagttgcaattaatataagaaataagaatccatcacattgagccatgtcattgacaatttgtaatccgttggatttcatatggacgcttggcagttcatttcagattacattactcgtttgcttgctatgcaatgtacttaattagcacatgcgttgagaaataagcacaaactttaacgtgttcccatactccaacaggaataatatactatttgttactttttctactacctactcattataggttgctatattttaagatggggaatacataaacaactatgaaaaaaaaacaggtcaaaaatcggagggagtattttggaacggaaggtgtaccatctacatgacgacttccttgatctcgaagaacttgatgattagcatatctgaaattgttggtcggcatatatttaatggagtactgagcagtaactttgtgcgatgcttttcctttgaaacatacggaactcgtatttgtcaaatcattatcatgattattattttataataaacaattaaatattatgaggattatataggtaattctggtttattggtgaagtgttagtagacagatggtctgacttgatcaagtatcaaggacagttagtagacctgtggcatgtggctggttcgactgacaaggtagcggtggtctgattggagccgtgtgtgcagttagacttactcctagatagttcgtgaactccggatttagaggggtttcccagtgaatttgagtgcttaatttttaaggcttgtaattgttctgtatgctaacataagtcaaagatgacaaagacttctgcttgtatattgttcttttttgtttatttatgtatatgtgtcttgagatcacatgagtatcgctgatgatggattggaagtcgagttaggtgaaattgatgtacaaacaattaaggagattatgaaagatgatcatagtaacaaacagtgcaagtggaggtgaaattgttggcatacacgggatgtgagcgcatatgaaagacgagtcaaattttgaaaatttatttttgtaggtggtcccttaagagggctgttcctcttagatattgtttataaaagtaaattttatctagtctcttaagtaaccatctggaaaagtcaatttctgcggtggtttggaccaaagtccccggtgcgtttctacttgtcttcttttttttttctaaaatcacgaggagtgtttgggaaaatggtttttaatatatagtggaggggagattgttgccggttagagagagtgcagatcctctacagtacttctcgtgtagtagcagtggcagacgtgtggacccgggcccacatgtcaggcactgctactgcaccagcagtactgcaggcaatccccattgggttggagagggtgactgaatgatcgagatgggaagcggggagttgtttatatgttttttttgtgtccagtgcaaaatattaaagtttatcattgtaaatttaactaataatgaaaggccaaaataggggatgataggtgttgacaaaaatttaagacatcacttaagcataattatggtcttacattatgtagatggtatagtctcagagtatatgtgtccacgttaagtttcctctataaatcttctaggggcgcagcctttttttcacaagaactactccctccgtccaaaaaaaaaacaaaccctggtttccgtgtctaatgtttgaccgtccgtcttatttaaaaaaattataaaaaaattaaaaagataagtcacgcataaagtattcatcatgttttatcatctaacaacaatgaaaatactaattataaaaaaatttcatataagatgaacagtcaaacgttggcacgcaaacccacggtttgctttttttttaggacggagggagtactctcttaggccagtcacaatgggggtttcactggtgtgtcatgcacatttaataggggtaagactgaataaaaaatgattatttgcatgaaatggggatgagagagaaggaaagagtttcatcctggtgaaactcgtcagcgtcgtttccaagtcctcggtaacagagtgaaacccccgttgaggccgattcgtttcattcaccggatctcttgcgtccgcctccgccgtgcgacctccgcattctcccgcgccgcgccggattttgggtacaaatgatcccagcaacttgtatcaattaaatgctttgcttagtcttggaaacgtcaaagtgaaacccctccactgtggggattgtttcataaaagatttcatttgagagaagatggtataatattttgggtagccgtgcaatgacactagccattgtgactggccttaggggcatagtacagtgcagctagcggagactcagagcaaacggttcgtgcgaccagtagtacttctctttttcgtgagctgaaagatttccgtggcgtactcagcggagtagttgctcagtggctctgtcttccgtatccaacgttgaccgtctattttatttgaaaaaattataaaaaagattaaaaagacaagtcacgtataaaatattatttatattttatcatttaacaataatgaaaatactaattataaaaaaatttcatatcaaacgaacgatctggacacggaaacccagggtttagctttttaaagacgggggagtagtaagcaattcggtcgacacagctacagctggtccagcgacagcgatctggccaatccaatcgaagaggaaaatcgcaacacgacgaagacgaattcgaagccgacgaccggtgatccccgccgtgcacgccggcgcccggccggcgaaactgcccgatcggctcggaagatttaatccgacttgccattattcatctttttttttttgcgaggacttgccattattcatcgactaatatatctgagcgagtgaatagcgctactgcttcttttggactcgttcggcagagaacggccatttgtctgaacttctttaattttagcgttcatcacctcatctgcagcctgaaggttcgtcaccgcgttggccgatcaagtagctagtctaagactctgagggcacatgggacgattagtaaatacagacacgcactacttaaccatcgaggacccatgcattacttaaaccaagaatctattttatcgccaatcaacgggacagtcacgacaagtttgagatcgacaagccaaaatcttctatgaatcaattgaatcaccaaaaagttttttaaaaaaaaaaaaccatgccgatcgactcagcgatctgccctgcccctaaacaacgcaaaccatcatatcatcctggtttatacacttttaatccgtgaaacatgaagaccatatattgggaatgaaatcctctgacgttacatcttccctgatgtgtgtgcatagatactagggctgtgttcattctcctattttttcaacccacatctcttgttttccgcgcgaacgctttttatacggttagatgatgtgatttatacagaaactttttatatgaaagttgattaatcatataataatacgagcttcattttattgagcacagttagagataatagaatagacatgtcagcaaccaccctccgattttaaatgagaggatcccagtttccaattttttcttcaaacttctaaattttctatcacatcagaaacttttctacatacataaactttcaacttttttcttcaaacatccaattttagtaaaacttctaattttgacgtggaactaaacacagcccaaattgatttgtttagaatatagaccacgagctggccgggtattggtagacgacgtgctgcgccggcggcgcgaaggtgtaggggtggtagctccacgggtactcgacgacggcgtgctccggcttcttctcctccttcttgacctcgccgacggtcatgagcgtggcgtggccgaccttcttgcgcagcgcggtggtgagcttgatggagtcgacgccgtcgccgaccaccaccacctggtccttgccgtccccggccagcgccaccgagtccaccccgctcgtcgacgccaccagcgccatcgccttcgaccggcacttgtcgctcgccatgttcaccttgatcacaatcttttgctgcaaaaaccaacccaaccaaattcagtttcaggctttcagcatgacacacttgctaatataagatgtggagtagtaaattatgtaccttggccattgatgctctcttgggtggaatgagattcagaggctgctgactagcaaaagcctgaatcgtgttgctgttcttcactttggaactgaagctggagtcgtgtttgtgcagaggagaggagaggagaggagattggcttggctggcagctagctttggcggtggatgagggagagcagagtccagagctccctctttatataggagtgtgccgctctgctacatcgtctgtacgctgaacaattcagatatcgatcgatgcgtcaagtggaacagttgggattctctgattttgtttatgaattatgaccatgggtcatgggctcatggcatgaatcccattggctgctttgctgattgctgctgcagacgcggcaagagaaaccgtgtcttgtgagtatactgaagtactactctgctgcgctgcttgttggactgctttcaaagtcgtatacttgcgagtagtagcagattaaattagtgaccaagcagtctccttcctctttcctccagaaggcttttggtacgtatctccactaacattaaactaatatcgcattatttcgaaaagtacgacaggtatgaagtttttccagttattgtgatgtctccggccaatccgaggacgcctaaagaaagtattgcttggtttgcgaaaaggttgctaattttttttaaaaaaaatgtttagacttattaaaggtttgcttcaatttatgaaagggttgtatgggacaaaataatttggttatcatccctttcttcagaactagtccaaacgaaacagtatattagtgtatgattaattaagtattagattttctgaaaaatagattaatatgatttgtaaaacaatttttctatatatatatatattaaaaaaacgatactatttaacagtttggaaagcgtgcgtgcgaaaaaaggtggagtgaagttgaaaacattgagtaaatggctcagccggttcttttctcattaagataaaggtttttcctcgattttcggtagcacgtttttcaaacaactaaacggtgtgttccgtacgaaaagtttatatctagaaattactttaaatatcaaacgtatacatttgtcaagtttataataattaaaacttaattaatcatgtgctaatgttttttttacacccatcaacttaatctttatgttcgtcagtttcaaacacctcagcagagcgccactactataaaggagccactggattgagccatatcatcgctaatctttcatccggtcacagctgctgctggtccagcgacagcgatctggccaatcaatccaaggagaaaatcgcaacacgacgaagaggaaagccgacgaccggcgaactgctcgatcggctcgaagagattaatccgacgtactgcccattccgaagctacggtcctcggcaacacatgcatatgaactcgtgaacaaacgctagtacatcttttggactcattgcgattaatatacgcccgcagacaaaatttggaagtctggttgaaagattagcgatattattattcttaactttcatcacctcccccttcagcctgaaggttcgtcagcgcgtgtgccgatcaaagtattctcaagagtgcacatgggacgccgatacgattagtatacacagacacgcacaaaccatttaatccaaaaatctaatactcccttcgtattttaatttatgacgccgttgactttttaacaaacgtttgactattttttttattcaattttttttgtgcaaatatgaaaatatttatgtcattcttaaagaacatttgatgatgaatcgagtcacaataaaataaataataattacataaaatttttaaataaaacaaatggtcaaactttagataaaatgtcaacgacgttatacattaaaataaaatatagaggcttaatttatcaccaatcaacggacaacgggacagtcacgaaaatttgagatgcacaaagccaaaatcttctctgaatcaatttaaatcaccaaaaatgagagggagggggggacgacatgctgatctctcagcgatctgtcctaaacaacccagaccatcctactttatacacttttaatccgagaaacatggacgccacgtatcttgatcttttcgatccaacggaccagattgattgattttatctaatacgagtagttaagcacttagcaccaccacggcgagctggctggatactgctggtagaagacgtgctgcgccggcggcgcgtaggtgtaggccgggtggtagctccacgggtactcgacggcggcggcggcgggctccggcttcttctcctccttcttgacctcgccgacggtcacgagcgtggcgtggccgaccttcttgcgcagcgcggcggtgagcttgatggagtcgacgccgtcgccgaccaccaccacctgatccttgccgtccccggccagcgccaccgagtccacccctcccgtcgccgccaccagcgccatcgccttcgacctgcacttgtcgcacgacatctccacctttatcacgatcttttgctgcaaatcaaattatcaaacacaaccaaattcagttccagtttgtttcagaaaattcagtttcaggctttcggcacacacagcgatcgaaaccaaattaagctgtaagaaactatgagaagcaagtgatgtgtagtaattaggtaccttggccattgctttgcttaatttcttggcaggaacgagatcggaggctactaattagcaaaaccctgatcgaattgtgtgattttgtactcttcactagcttgggaattagctcagcttggcgtggatgagtgagataagagagtctccagggctgcgctcctttatataggagctgatgctgtcctgtcccaactctgacgcgtacagtacgcttgaagaattcagagatggaccgatcgatccgctcgatgcgttacgtcgagcagttgggatttcagaaattgttaacgacttggctctggtcctcgcagagacgagaagacgatgtgctgcagacgcggcaagaaaccgtgtgtgtctcagtgtggttgtgtgtcttgatcagtactccagtgctgctgcttccagtgaaatcagcgactagtatgcatgtgccttttggacccttttaactagaaatcactagattaatgtgtgaccagcttggagatcaagctaagcactctccttcatccttcctcccaaaggctttgattgacagtactctctccatattttaatgtataacgacgttaacttttcgactaacgtttgactattcgttttatttaaaattttcgtgcaaatataaaaatatttatataatgcttaaagaacatttgatgatgaatctagtcacaataaaataaatgacaattgcataaatttttcgaataaaacgaatggtcaaacgttagataaaaagtcaacggcgtcatatattaaaatacggaggtagtacaagtttaataccttcattagctaattatacatgacgtcgactgcgtgacgtcggcttggaaaaacagaaagggaaagaacaagtgtgaacgtttaatttctttggaccgatcattgtgatgtgtccgtatcttccttgccactcaagaatctggtgattatctgaagtctgctcacgttgactgaggccccgtttttcctcggttaagatacctccgttttattagcatattttttttaaactgttaaacggtgtatctgttacgaaagctttttatatagaagttatttaaaatattggataaatccaccttcaagtttaaaaatccaattaatcaatatgcttatgccttttttttctgtgtctgtacttaggacttgtccaatttgttcttgcaaccttaccaaatttttataagataacacttcaacccttactaacttgccaaatttttggcaattctaaaagtttcctatcttaaaactctatcaaaatttgaggagaacatggaaacaaacaaaaccaacattaccgaaattccataataccaaaataagtcaaaattcggtattaccaaaatttagtactatgattaatttgtgcaacaaagtgagcaagtccttaatctatatccttagttattaactccaacgtggtataagtggaataaactagcaacagtggagcagaattcttgccactcacacctggggacaatatcactatcagttaattatcgcgtaatcaatccaagaattaatactcagtaagatcctagctcgacgacaacgaccggtcatctccggcgtgcacgccggcgaacaccccatggattcatccgaccgggtcagtcggtccaccggtccgagcttaattgcatctattcgatcgagtgcgtgaacaacctacttcttcttccttttggacttattgtgttaattaacgcggtagagagaatcatatttgtccgaacttttaatttttttatcgatcatttgtttgaactttgatgtaccatgtagtattgtattaattattgtttgcttaacttacatcgcctcacctgaaggttcaggggttgtttggttgcatgccacaaattgccacgcctaaagttagtcatgccacagttttttagctattgtttggttcatgacacaactgtggctagccacacattttctctatatggccccacatgtcatacactggtattttttgctaactttggctaagttgtggcttgcattttgctagccacacattttgtggcagccacaccttgcctaatatggagtttggtaaagttagtaagcaaccaaacatcccctcaatttgtcggtcgtcgcgccgtccatggataatgccaatcaagttgatttttctcatttgacaatttttagtagaacgcaaacacgcgcaattgtttttgttttccacgcaaggacaacagcgtgacaacttgctggtcaaggatcgggatgttgagatgtgacctccttcgcactgtgccaaaaggagcgcatgaactccacattaccagtaacttatctgattaatttgtgctattttacatttggttctcacgcaccagataaatccgtgaatcataatgagtatttttacaaattcagatagatgctaaattatatttaagttcttgtactactaatatgatttaattaactgatatgtgtgtgtgcagatctcatgccacacatcaaacgattaaactatacgattgactgaagatccaatatattatctcttttttaatatatatatatatttttaaagttagacacatgtgtattaataatgaaaaaactaaataagaaaataataatgattggttgagaagataaagtacttaaagaatttgatgggtgattgagaacaaaatgtaaatagaaaaaatatcatattttagaataaatttcaaaaagtaaatcgtcaatcgatgcggccgtgtaagttcagagcggacaagagccaacaacctcaactctcagtttgtttttttttttgaaaactcataaatttattcatatagtgaggattacagacagagctcaaaggaaatggcatccccagaacatcgccataaaagataagacataaaaaacaacaccatccattcagaaggtaaagctagctgaactaagaaaaacatcctccaagataatccaaacagcagtaaagaacgcgatcgacaggggactgcggtaatgccgcgacgaccacgtccacgagcctctactgaagacgcgcacaccgcttgacagaccggtgaccccttcggctgcctccacggaaacggcgctattcgaggtttgttgttgagtcgtaaatttttcttaagcttcaccggactcaacaaaatattgtcaaggagttctccatcaaatctgaggagcacagactgcaatcctatcgacaagagccgactagacggtctatactcaacccgaatggagccctcaacttgaatactactgcaagtagatttgaagaaagtctccatactccaacttgccttgaacatgcaagaattaggatggcggcgactgaacccctgtcttgtaacgatttggcggaggtacgcaacaccggagatggaagggaaaatgttgccgcagagagcttcaataagcaggagcctgagcaaccaaccaacaagcttgccaccaagagcttcaacaagcagaagcatgtggagattcaaccaactaacaagctggagcagctcattcagcccaccaacgagcatgagcagcagcagctcttgcagccaccaccatccgtccttgtcagggagcctgagacggccggcccagaaacaccacatccatctccatcactctgggcaagcaatgaacagaggccagctgcaccggatccaccaccgcaagcccttgtcgccatggaaaggacgccaaacgccccagatccatccatcttcagcgacgacactgggacagccacggccacaaacaccaccgccaccatcgtcttctccgatcgccatgaagcaacaccggcgaaactccaaaagggacaaacccgagctacaggaagacctgactacggaagaactccgacctaacctactttatactagtacgggaaggtggcctggcccctccttcggccctcaccggcggcgaaccaccggaatcggggggaagaggggtcggggagggggattttactatagaagcctattctcccacaagctctccagagacttctgtttaactctcagtttgttgtttggtgatagtgcggccatgagaagaccagttggacaactgcagaaacaagaagatcaaaattaattccacacatcaagtcctaaaagtcaaaatgggctatatgatccaaattacatcgaagcatccatttgtagaactttgcgagaccttagctccacaaatcaacaccgtggaatcgaaaaaattgttgtcgactatgtgcgtgcgtgacagtacagtgcacggttgaaaagcaggggagaggcatcagtataccagaggtcagaggaaattggtagtaatgccacgaagttaaggtgccacaaactcaagtggctttgttgtttttttttatcttgtctaccacaataaaaaagaaacgtaaaggaaaaaaaaaacatttcataccccttattaggggagattagaagtgggaagatggttgaagtaaagttgacgaaaaaatatactccatccgtttcacaatgtaagtcattctagcatttcccacatttatattgatgctaattatatgtctagattcattagcatcaatatgaatgtgggaaatgctagaatgacttacattatgaaacggaggaagtaaatgagaagtggttagataaacatgtatagcactctataaatcttcctatttacagataaatttcaaatgcattatttatcgacagagagaatgtactctgcaagtcggatgatagcctcaaaatatttaaacttaacaaaccgcaaagctctgtgtcttctgttcaaaacctcaatcatcacatccccgcgctcccacttcacacattttttatcgcgggagagcaaaacaaaacatcaccataataatctctcttgcaataccgtacaaaaagaatattcgcactacgcgatgtatacactaccagtgtacatacatacggacggtatgtgtacacatggtattctacatgatgtagccgtaagggctgtaatggtggtacgggtagtagtagtagtacggcgggacggtctcaggtttcttctcttccttcttctcctccttcttggccggcttggcgtcgccgacctccaccagctcggccggcccgaccttcctccgcagcaagctcgtcagcttcaccgagtccacctcgcccaccaccaccaccttgctcctgtcgtcgccggcgagctccaccgacaccacgccgccggtcgccgccaccagcgacatcgccttccgcctgcacttgtcgctccccatgtgcaccttgatcacgatcttttgctgcaaagatcaagaaccatggttgttgagtccagagaactcaagaacggcgatgatatatatgagaagggagaatcacttaccgccattgctgaggagaattgttgatcgatcgaacgatgagattgggatgaacgaagaggtcgaggaaattcgtgtgtggatcgtcgagcaagagaggtgagcttggaaagcagttcagcttgagctggtgcagagtcccctggcattagctcctatatatatacacagcttaagtgcttaaccacccacatattggcagatgaacaaatcatactttgtttaattaagacttcgtctctcagctggtctgcaggaaggaacgacttggcttctcgatcgtctcgtcagttgtcacttggtttattaggacacaagacacttttgtcactttgtttctcgagctggactagtgcttaggctactagtcagctggacgagattaggcgttagtgcttgtcctaattatagttggtttcctacttggcgaccaagcaagttgtaaacgcacaagtctgatgataatctctctgctaaaactgttgcacaaaactctgaattgaccgtgattaaattttactttgtgtcattactgtgtgcttagccgaagtaattagccatggtattcaggttagtagtctcgatcgcagtcttttgattcgatcttcttgtatcccccttgttgaaaataaggtgttgaaagtactacaaaataactcctagctaccagaagatcatcagaagataacataccagctacagtactgcaatgccacagatagcaacggttggacacaagtagataagtatcacctccatcgagcgtcagtacttgcccagcgacgacagcgatcttggcccatcaatcaagcaagaagatcgcaacacaaagacgacgacgacgacgaccggtgatctccggcgaactgctcggctcggtcggagaggtgaatccggctgggtctcagtccatcggtccaagctacgaacatctatctgaccgcgtgagagccatttgtgatttgtctgaagttgcttttgggcttaaaagtgaacgcgtcagagaaaccacttgtctgaactttattatatatgcagcgatcttttgtctcaacatgatgttatgttgcatttgaataaccgtatcatcacctcacctgaaggttcatcttcgcgggcgatttgcaagatgcagattttaataagtcagtgcgcacatgggacgatcttgaacacaaatattccagaagagcctgcatgacgactcgcaggtcaatggattgggatgctgagatgtgacgttcggagtgccaaaacgagtgggctccaaaattgataactaaccagatttctatggagatctcattgcgcataaactttgtttttcttagaaacacggtataaacatatgtgctcatagcacacgctcgttcacccctatggacgcacacgtacaccatatccatatgatcacttctttctattaacgcatttatgcacatcatacatctatgagtactcacctctattaacgtatacacgtacaccctatctttattagcacctcctattagagattacatattcatacacgtacatatttcaaagagactacctatacctaaatttaagtgagtattacctaatagatatacatgagcgagtaacctaatgaataagataagacaagagacatatatgggtcttacatatagaaacgaatcaaaaattgttaaaagttgtttttctatataataaatcatccctccaaatttcagtcaaaattgataaatttctataatgcaaacatgggtggtttgagttttacacaactcagatgggtatatataaagtggataaaatagatattacccttctcgatcatatccaaattttaaataggtaattttgttacccataacctacataaataatatggatatggatatgtgaatcggtaataaatatcaaatgaacaggcctacttggatcactatgagatttgtaccacacgaccaactctatttttttcccctcccttcatcagtaccactagccgccacttttacgtgcacacatgttccccatctctgatgccaccacgcaacctagccaggtggtcggaaagtgtcaacggtgtcaacaaggtctactggctgtggattaacaaaatagatgagaagattaaccttaaaattcagcttttacacatagtaggtagctatatttaggacaaactttaaatagttaactatattttgggatctgggacggagagagtaagtgccagtaaaattggtactacaagaataaatagtgccgggtaagaacaataaaatcacttctatcattttagtactgaagcaagtactttaatttgtcggaaatttcagtagaacagtatgagttcagacgtaaaaccgttacaccacgggtccacggcctaagaaaaaaaccatttgaaaataccaagatcgccttgttcaaaacctcaaatcatctcacatcctcgaccccacttcataccatgagacacaaaacaccacttcatagtagagggatcagcaaaacaaaccgtaatctttatacacaaaactcatgctagtactgtacagctactgtgaagtatgaacaggacgtacggatccagaatagatgctggaaggctcgacatccattcccttcttcaattcccctgtccccctaaatctccgtgaagagaagatagggggatggagaagaagaagaagggaggtcgtaaagacgagcctccctccaaactcattctggattccgccctgattgcatttcctctcctctacatgatggagcaggtgctgtccgggctcgggttgcagccgcaggggcagccgtgaggcccgtagcccgggtggtggtgatacacgccgccggggtggtagtagccgtagccatggtggtagtacaccagctcctccttctcctccttcttcttcgcctcctcctccttcttcttgctggcgtcgctcacctccaccagctccgccgacccgtccaccttccgccgcagcgcgttcgtcagcccgatggagtccacgtcgcccaccaccaccaccttgctcctgtcgtcgccggcgagctccaccgacaccacgccgcccgtcgacgccgccagcgccatcgccttcctccggcacttgtcgctcgacatgtgcaccttgatcacgatcttttgctgcaaagaacatagcacaatatcgccatggttcagtccaaaagaattattaaggagtgaatcgaacaaagccgcagctctgcaagaaactgacgatacgagagacgggaaaggagaaaaaaagattggtttcaggccgcgtaccaccattgctgctgctgcgatgaacttgagaacttggaacgacgaagagtccgaggaacttggtagatgctaggattgatttgtgtgctggtgtattgacggagcaagaaagagaagctgggaagtgggaaagctgttaagcttgagctggagcagagtcccctgagctcctcctgtatatatacaggttaagggcttagccactcaacaattcgtaaatttgtttaagacttgtctctggtctgcaggaagggacgacttggcttcgtcacttggtcaagcagcgcgctgacactttgtcatctagtactgagctggactactagtcagcaacgagattatactatggattattgctcgtgcttaggattggtgtgcgaacttggcgaaggtctgccgatcaaatttgcggctcaaattgtttcacaaataccgctctcgccgcaattctgtcgacgtactgacggtgctgatcttaaattcgagctctgaattgacagtgacttaaaattttactcttacacttgtgcatccgcacgcttcatcactgaagtgattaaccctcgtatcgtattcagagaggtctccatcgtatccgtacgtgcggtcctgtttgtgtatccatctgtattagttagttactgatcaaaacgaaaaaaatactatctttggaacgcgaatttcagatgatggtccagcgatggcgacctgggccatcagtttggactgaagatcgagggaagggacaaagacggtgactggtcgattaacaagttattgtaccagccactcagattactgacaagattaatttagcagccccgaacaacgtcatgtcagctgatgacgcaaaaagaatcgaagggagtaaattactaattagcagagagctgaataatcaacggaggggcgaggcgagagtgattgtgtttcaaaacaaaagaccttcttgcaattaagtgagtcaaagtctcaaggactcgaggattggaatggcgaactgaaagcgagtgtgcccgttccttgtctgaccgacgatgctgacaatcatcggagacgaagacttgaccggatcacaccgctgagtgggtgtcttcagccttctcctaccgatccccacagctcctacgaatgaaggttactaacttactatgtacgttacattgttaatgcgcatgcttaccaaactattaaacgatgtgctttttataaacattttttatacgaaagctgttttaaaaaattatattaatcgattaaaacaaattagttcccaaccaacgaacgcagccagagttaatggttagtggtttgtttcctcttctccctcgcactcttttgctttcagataagacgataaataagaacaaaatttccttccatcaacaaggcctattagctcagctggttagagcgtcgtgctaataacgcgaaggtcgcaggttcgagacctgcatgggccagttttaaattttctattgttcatataatattttgtcaaaaataaacaacataaaagtgggctgattgatgcggcccaacaactaccagtatccgaggccggcccgtgcaaagctaggccctatatagatggaatcgaacacttttgggaaaaggtccacttggaatcccactagtggcctcaacatatccatatacctcaaccacaaatcaggtatgacgactccgccaactattaaaactgtctaaaatgatttcgtcggttttaagagcggttttcgctgatgtggcagcctagtcatcaaataaattttaaaaaataaagttgagctcacatgtcatcccctatctccactaacctcgctccccctttcttcttctcgacgcccaacgcagcagggagtcgggacgatgacgggaagcggcgacaacagggctctcctctctctctgctaccccagccccttccgcaccaccggcgctggcgatgaagtggccgaccgagagggaatgcggggtggcataaagatgcggagtagccaagcgacaccctcgatcatggtgtcgagcatcttgagggtgcaggggaggcttgagaccgggttgagtgtgaagacctcgttggagcgctaagcaaagggaggtcagcgctatgcaccctcacaaccacatgccgatgtcttccccgtcctctagcaaatatgtgtccccgtcggctcctcccacctgagagcttgccaccatcattccgatgtgccttggtggcccgcatgaggacacataggaaggcatcaaggattcagatggaggccatggatccgagcccaagtttcgctcactggctccctcaatctcggctttcttgtcgtctccctcctctcttttgttgagctcgagtttgcaattcgttgccggatagtttgtttttgtgtgtgtgtgtgagagagagagaggaggggtgtaccaccgtcggatctatcttccctagccccgtcatgcggatcatcatgggtggtcatcgccatcctcaaccgcatcgccggagttcgagttctacatggtcgggaagaaaccctactcaacatcaacataagagcagcttggctggccactccgccaccagtgtcagggtaaaaggggttgggtgtgggagagagaggagagccccgtcgtcgtcctggcaccttgctgctgtcaggctgagaagaggacagggggagagaggttagtggagagagggggatgataggtgagtcccacttattttttaaatttatttgatgactgggacgtcacgtggatgatacgtcagcgattaccactatcacactgccctaggagttaaattgctctgatttcaattgttagggatcaaaatatctatattgcggttgaggatatgaatcagattagaccaaagttcgaatttggaagcggggttgaactgcataaacccgtggtcagctgaccacaggcccgcaaagcatgtgtacacatgtcgccgtgttgttctaaatagtggataaaaacttgaaataaaaacattgcaacacaacaaaaggtcaaaagcaaattatccgtggtggataaaaacttaaaaacttgaaataaaaagagtgaagtgcaccagcggtccctaaacttgtgcgggtgtgtcatctagatccctgaactctcaaaatgcatttttgggtccccgaacttgtcttgcatgtcatataggtccatccgatgacgtggcatgccacggtgacgcctacgtgtcggtgaggaccccacatgtcagtcaaatgtataaaaataaaattaaaaaccatattttctcctctctacctcagcgtcaaacaccaccgcctccgctcaccgacatgcgcgcgccggcctatgtgcgtaggctccgtcggctccgccacactggcctccttgccgcgggcgaagccgcacccgcctcggcccggccaggcagcctcagccggctctccgcgtcgggctccgccgcctccgcctccgtgccgcaagcgacgccgcactcgcctcgcccgaggccgcttcctcggcaccctccgcgccgcaagcgacgccgcggcttctgttcaattagcccgcatagttatggttgcatgcacgggtggcatgcattggattcccatgctgcgtgcatatgtagcatgcatgggcgcacgctacgcgcatggcggctagctccgcctagcactccactggcttcagccgagtaacccgcatgccgctccacgacctccactctcgcctctcgccacggccaaggccgttccgcctcatcttgagctccggctcgccgcaagcgtcgtcgagggaccaactccgcgcgggccacggagtcacctccgcgtcggcaagcctctgcgtccgcgcgcggctccgtcgcttccgcggccacgcgcgactctgccaacgccgaggggctccggccgtcgtggttgtccgcctcggcgttgagccacggctccgtcgcctccacagccacgcgcaactcctatgctgtcgacgttgcgacctcgcgcggctcgccgccgccgccgccacgtgcgactccgtcggccgcgcgcggctacgtcgcctccccacccaggcgcgacacagcaaacccctccacgcgacacggcggccagaccgccgcagctactcgctggcctccgctcggtagcacgtgtagatagatgcatgcagtgcatggccctattcacgtggcaaggtgcaggagcgtggcaatctgcagccatgcctgcgttcggggacctatatgacacgcaagacaagttcggggacctaaaaatacattttgagagtttagggacctagatgacacacccgcacaagtttagggaccgctggtgcacttcactcaaataaaaacattgcaacacaacaaaaggtcaaaagcaaatcatccgtggtcgataaaaacttgaaaaaaaaagggagccggcaggatgggcgtgtagattccgcttcgtatgatttaagtcaaacgatattggccgaaaccaatatgtccaagcttgtggagttgttcatcatcaaaccagggttggtggccagccaaagccctgggagagacaacacaggccaggcttctgcccggaacagagccggcctgaaaagagcggcgcacgacaacttcccaaccttgccaactccccgccccccgtaagagctggggatacaggcccgcaccaccaggctcggcgatgcgatcacctccacgccctattttatccagctctcggccgtagcaaattttccgtgtgggactaaaaattggtttacgagggggctcatcgtatacggtataccgtatacgcaggtaatgtacgtcccctgcgtcttacgcaacacaagcgtgcataatagtgtggatcacgcagaaaccaagcccatgttattattctagttgaattaattttgtcatattgttttcggtgcgattgaatcttgtttagccgatcgcttggatatatgatgaggcgatcgaatgttgattcaaagctactccatccgtttcataatgtaagattttctagcattaccatattcatatatatgttaatgaatctagacatgctaaaaagtcttacattataaaatggaggaagtaataagattataagaaagagatcgatcgggttctcgtgcacaagaccatgttataattctattaagttttgtggtcgaaagggtagtggttttcttcctcaacttgaacatacaattgtgattttgacgactaggttgtggttttactagctctcgcttttacaaaggaagctacgattagggcgacgctaatgggcggaccccccaatccctctatacgtcctctccccccttccttctccccttcttctcttcctactacaccataaattttaaaataataaaaaaacaaatttaaaatttttatgtataaaaatactatatataaaaaatatttgaattcaaatttaaatttgaatcagatatataaaactttttacttataaactttgggtctataaactttaggtgtatagagatactatatatgaaaaaatttgaattcaaattcaaatttgaatcgggtatataaacttttgacttataaactttgggtctataaactttaggtgtacaaactttagatgtatagaaatactatatataaaaattatttgaattcaaatttaaatttgaatcggatatataaacttttcacttataaactttgggtataaactttaagcgtataaactttatatgtgtaaactttaggtgcataaattttctaaaataggaaagtaatacggtgctaaaaaagaaaagtggagggaggggggattgatcgcccggagcgattgatcgctcgttaggattctcgctacgattagcatctgttttaaaagtcgttcaatattataggagtactaagttaaacatgcgattttatagtttaatatttgtgacatttattagcggtttatgatctatatcgatatgtttccttccacgaatatttcagataccgttttatgtttcgggctttaccttttttttattccgtttctgagcgtttccgagaataagcttaagatattctggtaaatatgaccggttgttttacgtccggttgtgatatgacaacaaccgatcgatgtatggttgtttattcaaagctctatctgtatatttatctatataatcatccaaaaattgttgctctttagtttctccccacccaaaaaaccattatagtgacgatttctaatacataatagagctattttcttaactgttacgactccccttacagcaccgatctaattgtataaggccctgtttagtcccaaaaagtttttcccaaaaacatcacatcgaatctttgaacacatgcatggaacattaaatgtagattaaaagaaaaactaattgcacagttagggaggaaatcacgagacgaatcttttgtgcctaattagtccatgattagccataagtgctacagtaatccacatgtgctaatggcagattaattaggctcaaaaaattcgtctcgcggtttccaggcgagttataaaattaggtttttcatttgtgtccgaaaaccccttccgacatccgattaaacatccgatgtgatacccaaaacttttcatatcgcgaactaaacatgccctaactatgccaacactcactgctacagaaactggccctagggagggaggtgaatgaatgcaatgagttgaaagagatcattgagcactttgatatcagtcagggacctgacattctgagatggggacaagcacaaaaataacgaatttggacacagaagttggccttgggcatgcagccaggagcagtagtagcagcaatgcagcaacagctgtagcttgatgcttgctcgtttaacagtaactccagtttgaattttttttgcacgaagcgaacttgaaagcatgtagtgaagattttctaatgcatactaatactgccgcaaatatgccatgagaaaaaagcgtcacatatccaatctgatttttctaattcatacttatttttcaaaaagtatatttttttctacaacaaccgcaaagagtgtcacatatccaatctgatttttctaattcatacttattttttaaaaaaatataagaattgaaaatgtttttatcagtattttggtacgtcatctatatttgagtcggtttttaaattcgttcacttttgaaaatacaaatccgtgtttgaattgaattttaagttcgtttgttttggaaatacaaaaagagtcgtataagaaatcttattaaaaaaactcacatgctaacttgagatgaaagtcagactcctaattgcagctcatgattttctaaaaaaaatatctaagcgaattcccacagtgaattttatcctagctaaaccgtataacaataataatattaaaacaatattcacctgtgtcgatgtttgagatcgtgactacggtattttgatggtatggggatttttggtaccagggtatatgcgagattgaggtaaaatagatgaaggcaatgatttttatataggttcgggccccttatctggtaggtaataataaccctatatctattggctgaagccggtattgctatttattcatctggatcacataagtacacaagtacaagttcctttaccatactgaatgcatgcttattaattcagttaattgctttacatcgatgtatcctgcatttgtccaagactactcgtcccgccagcacacgtgttcgtaacccgagtgagagttggtattcatgcgtcgccccccgtgtcgggcgactcgggcggcggaaccctagccgccgccgccgcccttccccgccccttcctctgccttgccgccgcctgagcgagcggccggcaaagccggcggctcgcgaggatggcggcggcggggctcgcggcggccatctcccgagctcctggcgcgggtggacgcaaaggcagtggccgaccggagcggcgccggcgtcgaggctcatggcggtggatccggcgtcaccaccaccggatctggcgcgctcgcagctggatccggtcgcggaggcgcgggcacggcgtcggcgaggcgtgggcgctggcggccgcgacaggcggtggcaggcgcaacggcggcgcaggcacgggcggtcgggcggcggcgtcagtcgcgacggcggagcaggcgcgggcggccgcggcaggctcggaggcgcggctgctgtggccggcggctcgatgcctggcggcgacggcagcggtgcccccagatccacgcctctcggccggatctggaggatgggagtagtcggcaacggcggcggtggcaattggcgacggcggtctcggccggatctggacgccggtggcagttggcgacgacggcgacggtgtggtgacggcggtggcggcggcactgggccagcggcagttggcgacggcggtgtcggctgtggtggctgccgtgtcatctggcaacggcggcggaagacatggcgtcgggctgctagctgttcggtggtggagggcgacggcgcaacagcgatttgcagaggcggtggttggcgtcggtggcagcggcgacggcggctgtgactctggaggtggtggcgacgtcggcggcggggaaggagtcgggggcgaggtggctgggtgttcgggagccaaggatgtggtggtggtgaccgtgtttgcggtcaccggaggcatggcggccttggttgactagccgagggcgtgggagacggctgcagctggccggcgcggtatcgttcggtggaggggtcggagaccggcttggcgcagagaagcgcagccgatggcagcggaggccggctcggcgcgagaggcgcgggcggcggagatggaggccggcttggcgcgagaggcgcggccgatggagggaggccggattggcgcgagaggcgcgtccggtggaggaggccggcttggcgcagagaggcgcggccggcggtggaggaggcgacctaggtatgaggaggagttgccggtgggtgtggcgcggtcttcggcgcacgaaggctggtcggcgggggacgccggtgcaggggtcccacatgtcggcaaagcttgtgcggtggtggagcatcggtgcgccagccgtgcctttgttggtctagtggcggtcggccacgcttagcggcggccgatccggtactagtcttctcctgggcgtgtgtgttggcgatgtcgtcgtgtgggtggtggtatttttttcttttcctggttacgactctccatggttgtaatcttgtacttttttcctgctctatcaatagaacttcgcaccgtctcgtgcgagtcgttaaaaaaaaagagttggtattcatgataggatatatcaatcattccagcgttagttataagagattaagagtgcggcgaaaaattaattactatatgacatagcagcactgctctttatttcatagtactatatatatatatatatatatatatattattactgcagcacaagccacacactgatgacgacacacactttatagaaaagaaaagaacaaagaaggaaaataccaaagacacgactagcacacacgcgcatatacatagccttacaggagcgcacagtgtaactcgtcctctccatgatcagccgtgtatgtacgtacgtatttttattcctttacttattgagaaacaatatatatatttatagtagatatagtagttgtttgattcatggttgagcagtggatcagtggttggagctatagctagctccggcttagcagcagcggaagcactcgccgtggtggccgcggtggcagcatccccagcgacagccatggcgccacgggtcgtcatggcgccacgggtcacggcctgggtaaccgccgttccacggcgggtagtggccatagcctggtggtccgccgccaccacccccaccaccaccgccctgcttgttggcctctgcaaacccggatcgatgaaacgtttaaatagttgaatgcaccgatcaatttaacttaaaaaatcaaactagccagaaaatatgcatgcatagaataccgatatatataaacttgtgtgcacatatgttagctgctacctaacctgaaattaaatatataaacgaacgtatgtatgcaacatgtaggttcaaaagctatcaatagtgtatatatatgcatgcgatcgtgcgtgagaaaaaaaaaagatcaattatacaagctactccgtagatcataactacgtatatagctagagatcgaagctgtgtctaccggagattcgatcaaaatcttattccttttgttttctacggaaaggtaaactgtaaacatcatatagcgtatatatcatataagtatatatagtgtgtgtgctcacgagggtcctgggcggaggcgacgaagcagagcgcagcaacgagcagaagagcgaacacgatgatagccttacgcgccatgtatactagcttagatctttttgatgatctgagagatatccttactgatcacttgttactagctgtgaacctgtgatgaactgatgagaaggtagtatatgcaaaccaaacgtatttataggcagataatgaaggctgctgattcggcctgaccgtgggttcgatcgatcgagtagttgatgacagtagagctctagctcgttgacattaacgtactcatcaatctatatatctatatagtatattctatatactttttgtgtgtggaagaagaaatgcatgccatcaagttgactctgtagctagctttaatttgtgtctgctagctcactcggtaaatccaattgtatatatggattttcacaagattgtttaatcgtggcagccagtcgaaagcgtcaaatatgagtagacgacatatagaaagtttttgccaaccttgtctagacatacttcttaattaatttactaagaatgcaagagagataaactcaagtgccaaaaagtcaaaataagaaggccgaaatgttgagcttttctgtaaataattctcgactctagacacacgatatcttcttttgagttatgttactgatgatagggacgattgactttgcttccagctatccgatcgattgtgatttggtttttagttttgttggtgttttccgtttgtttttatgggcaatttgatcctcctgaatgtttcaaggcgatgcatgcatgtgtgtatttatgttcaaacttttgcttagttagttataggttataggtcataagtgaagtcaattaccggtatgtacgttaaaaaaatagagtaaattttataaaatctcatctattataatccaagatactaataaaataaattttactatacttgagaaagtatcttgagatatcaaaattttacactaaaatttttagtaccttaagatacttattattacctccgttttaggttataagaagattcattaacatctatatgaatgtgggcaatgctagaaagtcttataatatgaaacggaggaagtagtacatagagataccaaattttacactaaaaaatatggtacctctagataccttctcaagaatagtaaaattaccctactaacaatagagattttagcacgtgaaccataacccggttagtatgatcctaaagttttataaaaccataccattaatcattgtgacatactactatatcaaaaattttaaaagcgaatgtgacatttatatgaataaaactacgggaaaacattttgaacacgcacctggaataatttctctgacatttgttgccaaatcaaaaaatatcattaaaataccgaagaataaaaaaccgcccgaccagccagagacttttaccactaccttgacgatgctccgggctccggcagttggactcgatcaacaaccaaaatcaacacggaatattttggtgcgtacggatcgtacctttttcatgaaaaattcctgacgtacaaattcaaattccgaatgcgcaggcaccccgtctcgaaaagaagattagaaacgtttcagattcagtgggtgagaaaggttaaaaactctaaaaaaaaatagcaggccgtgcatgggcagcccagcccattcatgctgcggccggtatgcaggtggccttttacttgggggaaagtccactatacatccctcaattgtgcaccgagttttattcatgtccctcaatcacaaaaccggttataaagtaataagtgcaaatcaactttctcgatggttttagctgacatagcacggcggtcgtgtgcagaaccagtgcttttggttgtttgcttcttgagttactaccttacttattttgagatgttcttgaatttccccaaaaagaaaaaaaaatagagatgttcttgagagtgcaaggtcaaattaaagccaataacatcatcgattcggctacaaaaattgaactggattcttgcatggaaaaattaacatgggccaagtttctaaagtgatggcaatagcaagatcagtagcagggctgggatcgtgagctcaagtacacaatacaaccaactgagaacctgatcgattggatcccgatgacgcgctggtggcgccgttcgctaccccacgaccacgtccactagcccgtgttggcagtcgtaaaacttaaatataccataaacaccttccattctttgcgtaatatattacaaacataaacatcgggaccaacaatccgtgttcaccaccagaacttatcgtttctttgccgggaccacatcgttgccgcccgcgttcctgttgttttggttttcttcgttgccaaccgtagcgcgttcaagaaaaaaggaaccccatcatccggaattcgaactcaagatctctcacatcaacccacacgtgcattaccatcccaccaaatacgcatatatgacttggatagagatgctttctttttaaactaaccctggagggatttttagtaatggttgttactaaaaatatatttaatccagcttagtgttatcaaccggtacgtaagtagccttgcaagagtgcacacaattaccagcacatgtacgtagtacctgtattttctctccaagtacgtatatttattcatttattgtcagaacatacactaattgtagatagtagttgtcactgatagatcaattcggcctcatgatctctgtggattggtggagctaagctagctatggctagccccggcgccaccttagcagcagcggtggcaatctccccagtagccacggtggcagcacccccaacggcagccgtggttgtgccagtgcgggtcgtggtggtggcctgggcctggtgggtagtaacctccgttccatggtggttagtagccgccgccgccaccaccatctcctcctccgccgctgccgccaccgccaccgccaccgcctcctcctcctcagccgccgccgccaccgccaccgccgcctccctgcctgttggcctctgcatgcacagatggatgggcgtacatcatatacgtatacttatggaacattgatcgatttaaacatgtgcagagtgataaccaactaaacatatatataaaagaaacgaagtatgcaatatgtaaaagctatatatgttcttcaagatatatgtgcagatgtaatttgcttgaagagttgagggtgtacatgcaaatgcaaacatatatagatatgcagctagctagtgtgtgcgctcacgagggtcttgggccgaggcgacgaagcagaaagcagcaacgaggagaagggtgaacacgatgagagccttacgcaccatgtatatatgctagtgctaggtattttgtttgatctctgataacactgatgactgatgagaaagttggacgcaaattaaccaagcgtatttataggcagaatgaaagctgctgatcgtggattcgaggtcgacaccgagtaattgatgacgatatatcagctctagctagctcgttgacactctcaactcgatcatcgatttagctatatattcagaatgttgcgagtggaaggcatgcatctctgccatcaaatttacaagtcaattgactgtgtagctagatttggtcggatttcacaaactccggacgctagcagttcaaacgtactatatatgttaatattctagctcactcggtaaatccaattgtatatggattttaacaaggtttaatatatcgtaccatgcgtgcacccatttgaaaaagtcaaatatgagtagacgatagaatgtttttgccagtcctatctaagacatacatacatgttcctaattaaaccccaagtgtctaaagtcaaaataaggcggccgaaaagtagagcttgctgtaaatataattcttggctccagacgtacgataatcttcttttgagtaatgctactgagataggaatgattgactttgctcccaaactacccgatcgattgtggtttatttggttttagcccttgttgttgttaattttccgtttgtttcgattagagaatttttacggtataatatactaatatatacctaagtataaacgatctaacggtgtagattgatcgatcttccacttaaatagaatgtagtataaaatatataagggtaaatttgtcttcctcgttaatttagatttggatatggctcaagtcttttttttttaggtgagccatttaaacgctttatctagtgctagtattccaaggaagagttcaaattcagatcaagccataatctagttattgtcaattttttgatacatgtagcaaggcataaattcttattagtccttatttaaaaggcacactccgacttcgtggttttagccgtaggacaccgcccgaactcacttttgagggaaaacactctataatgataatttgccaatggacaccgcgccgattagaataataatccccggttgaagtttcgagcgttcttttcctacgtacattgaaacaagtgaactagtcgaggtctactggagtttcataatccatcctagcttttacctcatgtgagcttgtcaggagtaacatcctatggaatggtcacatttgtcctccatgatctcaaaaatcgagatacaacaaatgacatttgcatcagagaagtgaaacagtgatgcagagattcacattctcataaaacaatttgcatcagtgatacagggcttcaaattctcagacattacagacatcttacatcttacagcaagtggaagagtatttgatttcttccgattgacgttatccagacattacagacataattctaatttttcatacaaacagagaactccatgctttttttctgaaaaacaagctgaaaaagctttggactacttcagtaacttgagctagccaagctaacttatgctaattaattcctcattgaactggctgatttctcatgtactctgagcactatgacagattcagagttgggagttgagagcaaaggcaacatctgaaactggttatgtctgaaaaactgaatttgttgcagtagagggttagctgaataaaagtttcatggaaggagagaagaaaacaaaatgcggtgtgtacatgtggtttggtgtcttgagtggctcaggtaccaacatggttaagttcaaatcgagagttttgcaactccatctttctattaaaaataaatcaaatctttataaatcctgctcacttcttctaaattcttcaattagatataaagtactccatcagctagcaacaacaaacgcagaagcagaaggagatgagaagccctgcttggtctcctgtcgaacggcaagaacgacgatgtcatatctgcaatactgcttggtctccagccgagcggcaagaataacaatggcagcaggcagcaatggccccgccgcccggctccctctgtgccttgctgctgcccctcccctagcatgtagtgccgcatggttgctgctggccagccgctcactccctgcgcgcctcgccgccccgcgccgccgcttcgagccctcactcttgctcgctccaccgctcggggtgggctccgaatcccaccccggataggagtacaacggcagtgcgcgggagctaggtggcggcggaggaggaggcagcggcgagcagggttcccttactgtttttggcgtggttaccggaccccgtggtaaggtggttaccgcagttaccgcgataaccgcgagacataccgtgattttaaaaactgaaaaggttatcgtgcatagtaaccgcgataaccgcgttgtaacaacgcggtttcgtaaaccctggcggcgagtctggttgcgaggaggacgaggcgacagtgtaatagtggtgagacggagggcaaagacggaaattagccaacgctatgaggagggctgaactggtagcgcaaatataacaatttcagaatgaactagagcatcaactaacaaaacggagggagtatatattattacatcacaaagccacacactgacgagacatcgacacatacaaggaaaaaaaagaaaaatacaacaagacacgactgtcacacacgcacgcgcacgtacgtacatagccttgcaggagtgcacacagtactataactgtgtgtttctagatcagccgcacgtatgtgtacgtgtatttattcctttattatttactacttattaatcatagtagatagtatgtaattgtgtcaccgatcgacatggttgatcttgagctgtggagtggtggagctatatagcttagcagcagcggaggcactccccccagtggttgcggtggccgcagcacccccaacggcagtggccaccgggaccagggtgagggcggtggtcccatggccggtcagggcggtcccacggccggtcgggacgccctgggtaaccgccgttccacggcgggtagtgcccgtagcctggtggtccgccaccaccctgcttgttagcctctgcatgaacgtacaaatatttatttagttcatgcatggatgagtttaactcaataacttaaaactaattagaaaatatgcatgtatgtaatattgatacaaacggctcatcgtttggcttatttagggaataagccaaatggcatatttgcaaacgaaaaatagtttgtgaataaacgtatttttagcgacctagaagcaaatgctaacaaataaactttgacaaaaaaaatcctaaaatcagctctgaatttaaggttgaaaattctaattttaactgataaggataaacataagcgaaaagctgaggctgaaacacgcgtacatgcatattagtagttaggaagttgtttttttatgggacggagtagtagatgttagctgctactccctccgtttcgaaatgtttgacaccgttgactttttagcatatgtttgaccgttcgtcttattcaaaaacttttatgaaatatgtaaaattatatgcctacacgaaaatatatttaacaataaatcaaacgataggaaaataattaataattacttaaattttttgaataagacgaacggtcaaacatgtattaaaaagtcaacggcgtcaaacgattcgaaacggagggagtacttatacgtacctaacctgaaattaagtgtatatgtatacaaacgagcgcatatatcacatattcaacatgtgaattaaagcatgcatgcatgtacgccttcattcatgtgtgagaaataaaaataatgagtgtgctcacgagggtcttgggcggaggcgacgaggcacaaagcagcaacgacgacaagagcgaacacgatgatagccttgcgcgccattttttgatctgagatcgttactgattaattgttactattagctgccaatgtgtgatgactgataagtgatgagaagacagggcatgcaaaccaagcgtatttataggcacaatgaagctaggttttgctgatcctgatcgatcgagtagttgatgacagtagagctctagctcgttgacactcaacttgatcgtgatctatctaattaattctatattttttttatgagtggaagaattgcatgccgtatcaagttgactgtgtagctagctttaatttgcgtctgctagctcaatcggtaaatctgttgaatatatggattttcacaagattgtttaatcgtggcatccactcgaaagagtcaaatatgagtagacgacatatagaaagtttttgccaaccctacctagacatgcatacatacatacatgttcctaattaatttactaataagaatgtaagagagataaacccaaatgtcaaaaagtcaagataaaaaaaaggccgaaatgttgagctttgctgtaaataatcctcgactctagacacacgatatcttcttttgagtaatgttactgatagggatgattgactttttgcttccagctacccgatcgattgtgattttgttttagctttgttggtgttttccgtttgtttttatggggaatttgatcctcctgaatgtttcaaggcgatgcatgcatgtgtgccatatatgttcaaacttttgcttatttagttagaaggtcagaagtgaagtacaattaccggaatctacgttcaaaaaaattaagagagtaaattttataaattaaggccttgtttagatcccaaaaatttttagccaaaaacgtcgtttggacacatgtgtgggacattaaatgtgaggaaaaacaattgcacagtttgcatgtaaattgcgagacgaatcttttgagcctaattacgccataatttaacaatatgatgctatagtaaacatttgctaatgatggattaattagacttaataaattcgtctcgcagtttacaggcggaatgtgtaatttgttttgttattagtctattttaatacttgaaatgtacgttcgtacgcttcaaaaacttacacccaaagaactaaacacaccctaaatctcacctattatttcaacatacaaacaatagagattttagcacgtgacattacaaacaagtatggtcttaaagttttatagaaccacaccgttaatcattgtgacatatttctatattaaaattttaataagtggatgcaacatttatacgaatggaactacgagagaacattttgaacactcacctggaataatttctctgacatttgctgctaaaccaaaaaatatcattaagataccaaagaataagaaacggcccgagcggccaaagagacttttaatagtaccaccttgacgatgctccggcagtcactacgtacataatagatttttctggacctcccctcccctcctcccccccccacgtccgttttgttttcatgcggttcgtaactgaaaccgcatagaaaaataggaaacgggcaacaggctgtctcccgtgcgagcggcttaagccaaccgcaaactccgcacaggcccaccatttaacccggccacccacctcccaccgcccgctccacctccctctctcccactctactccactccactcctctcctctcctcccactctcctctcctctcctctctctccctcagtgcacggcgcgcccctccctccctctccctcccctccacaacgacagcacggcgcgcggcggcgggcaaaggggccggcgggaggagagcaggcggcaactgcggcggcggcggccgccaccgcgggcgacagcggcggcggcacgccccccctcccttccccctagaaggtccggcggagggggggcttgggggtggcggatccggcggcgcgtggtgggaggagagcacgcggcagcggcggcgtgccccctcccctccctccccatgcatatccggcggagggggggcttgggggcgacggatccggcggcgccgccccctcccctccttccccttgtagatccaggggagggggcggcggatctagccggcgacgcgcggctctcctcccctcccttgcagatccggcggaggggagggggaccggcggagcgaccggcgaccggatctatctctccccctcctctctttgttacttgtgttttttgtgtgtgatttgttcatgtgagatgtgttcatgtgatgtgttcttgttgatgtgttcttgtgagatgtgagatgtgttcttgtgatgtgttcggcggcgagcgaccgcgagggcgacggtggcggcgggcgaccgcgagggtgacgacggcaggcctcggctaggcgacggcggattagggttaaggttagggttccttttttctttttttttggtttcttatttttctccgttttcgcgtgcgggcgcgccacccgtacgcgaaaatcgcgtttttccccgacgactgggtgcgtgcgggccgtccacccgcatgcgaaaattggctagcccgcacggaaaaattggtgctgtagtagtgagttggactcgatcaacaaccaaaaacaacacggaatttattaatcaagctagccggtcacatcaacttttggtgcgtacggatcgtacctttttcatgaaaaaatcctgacgtacaaatccaaattccgtatgcgcaggcaccccgtctcgaaaagaagatgttaaattgctccagctgacagcacaggggtggtgatggagaaacatttcagattcagtggatgagaaaggttaaaaactctaaacaaaaatagtaggccggtcatgcatgggctacccagcccagacatgatgcggccggtatgcaggtgctgtttttttcttttacttggggaaaagttcactatacatccctcagttgtgcaccgagttttatttatatccctcaaccacagaactagttacagagtaaccagtgcaaatcgactttctcggcaattttagctgacgtgatgcgggtggctttgtgcagaaccagtgcttttggttgtttgcttcgagttactacattacttcttttgagatgttattgaatttccccaaaaagaaaaaaaaaaagatattcttgagagtgcatggtgaatttaaagccaacaacatcatcgattcagctacaaagttgaactggattcttgcacggacaaatgaacatgggccaagtttcttaagtgatagcaatagcaagattcaagtagcagggctgggatcttgagctcaagtacacaattagggtgaaaaaggtaacggaaattcccggccgaccggtgttcgtttccgactttataccggccgagccatacggaaatggtaatcgaccaaaaaaatataaaaatggtaaaaaatatggaaatgaaaacggaaatggttttgcggttataccgatcgtttccgtatttaccgtattcttatgaaaattattgtttcttataatatggtaaatagcgtatttctaaatatattgatatatatagggcatgtctctacttgacccacagtttagagattgattgactcttcaatcaaatccctaatttgagtgcatggctaaaatggagttaatttataatttatacagtatagcttgaatttatttgtacatataacatacttatgtaaagttaaatatatgttttctatagtttaatgttttcgtatttgttaccggtttccgatctgtaccgacatgtttccatctatattattctgttttcggttttccgatatttccgatatcgttttcgtttccgaccttaccgttttcgatttcatttctgagaaaaatattattatggaaatggttgaggctgttttccaaacatttcctaccgttttcatccttacacaatacaaccaactgagaacctgattggaccccgatgacgcactggtggcgctgttcgctgccccacgaccacgtccactagtccgtgttggcacttggcagtcgaaaacttaaatataccataaacaccttttattcttgcagtgtaaaatattcctaacataaatgctcacataaacgttggtaccagtaatccgtgttcaccactagagcttgccatttctctgccgggaccacgatgctgccgcccgcgttcccgttgttttggttttgttcattgccaaccgtagcgtgttcattgaaaacgacacctcatcatccggaaacgtgttttgacgcactcacccggccgtgttcaccacttgagctcgttgttgtcgtttctctttctgttaagaccacatcacccactagtgaagaaacgatatttaataccggttggaaaccccctttagtaccggttgtagcaaccgtgacaagcaaataggcactaaagatctcgatctttagccagttaaataaccggtactaaagatgcataccaagtcataaagacgtgtgagatgtgggattcgaactcaagatctctcatctcaactctcacacgcattattatcctacctactacacacatatgacttggatagagatactttctttttaaactaaccatggaggcatcaccaaccggtactaaaaataataccagccgagactaaaaatgtttccagggacatggactactttagtaccggttcttaatctagccaaaatatttgtgattttggttaccacgatgaaagatcagttctctagtattggttgtcggctgcatttccgttgttttggttttcttcgttgcctattgccgttctatggacaagtcacatcgcgtgggacacatccggccaccttccttaccgttgtttggtgaattggaaaaattttaatgtgtcaaagaaacgggtacccgttcctaaataatggatctaattttcatatggtttaaaataagttttttttatttctagctaattttcagttgttttttctatttacaatattagttttactatttgatcaaataaaaattgttggaaactataattttccttcgtattgaattatttgtagctaaatgaaaaaaatgagcctttagcactatattgaattatcgtttcggccaaagttatttgtagttccatgttgttatttctataattatattatgttcatcatttatgcccagttgtagtatataatttaggattttaatttatgtcaatgaatgttatttagaacccattgcaatgcaagggaattacactagttaaatatataagtgactgaagagattggagaggaaaagtagataccaagatacgatacgtaagtagccttgcaagagcgcacacagttaccagtacgtgtacatagtatcagtgttttctctccaagtacgtactgtatatttattcatttattgacagaacatacacttattgtagatagtagttgccactgatagatcgattattcagcctcatgatctctgtggattggttgatggagctagccacgccgccttagcagcagcggtggcaatctccccagtagccgcggtggcagcacccccaacgacagccgtggttgggccagtacgggtagtagcctgggcctggggggtagtagccgccgttccaaggagggtagtagccgccgccgcctcctcctcctcctcctccgccgcctccgcctccgcctccgccgccaccctgcttgttggcttctgcatgcatggatggatgggcgtacatcacatacgtatacttatggaacatcgatcgatgcaaattaatcatacgtgaagagagtgaaaactaactgaacatataaaaaaacgagcgtatgcaatatataaaagctatatatgtgcagatcgatgtttgctcgaagagttgaggtgtacatgcatttgatcttaatttaatctatttttctacgcaaaggtaaacatagatatgtagctagctatagtgtgtgcgctcacgaggatcttgggccgaggcgacgaagcagaaagcagcaacgaggagaagggtgaacacgatgagagccttacgcgccatctatgctaggttttttttttgtttgatctaataaccgatgactgatgagaaacttggacgcaaaccaagcgtatttataggcagaatgaaggctgctgatcgtggattcgaggtcgatggagtagttgatgacgatatatcagccctagctcgttgacactctcaactctcgatcaatctagcaaattaacatctgcaacatagtatgcattcctgccatcatgttaattgactgtgtagctagatttggtcggatttaacaaagtccagtagctagtacgtacaaacgtaaatccaattgtatatggattttgacaaggtttaatatattgtgccatgcacccatttgaaaaggtcaaatatgagtagacgagatagaatgtttttgccagccctacgtagacatgcatacatgttcctagctagctagttaatttaaaggaaaaaggatgtaagaaagataaacccaagtgtctaatgtcaaaacaaggcggccgaaatgtagagcttgcagtaaataattcttggctccagacatacgagacaggttcgtaaaattaaagacggtatgaaatatctattttgccctacgttccttccccggtctatcatgtctcgcacctgcacgagcgctccacgcagcgcacgggcgctggcggcgcagatgatcggcgatggtagcgcgcagagcggctgtggaggagggtgaggtgggccgacatggaagaggttggggtgggggaatgtcgaagaaggcgacgcaaatgacgcaaacctgattggatcccgatgacgtgctggcggtgccgttcgctgccccacgaccacgtctactagtccgtgttggcggtcgtaaaacttgtatataccataaacacctttcattctttgtgtaatatattacaaacataaacactcacataaatgttgggaccaataaccgtgttcaccaccagagtttaccgtttctctgccgggacgtgttcactaccagagtttgccatttctctgccaggaccacatcgttgacactagtgttgctgttgttttggtgtttttcattgccaaccgtagcgcgtttaaggaaaatagaaccccatcatccaagaatgtgttttgacgcactcactcggccgtgttcaccactagagctcactattgccatttctctttctgttgtgaccacatcgttcactagtgaagaaacgatctttaataccggttatagcaaccgtgacaagcaaatcgggactaaaaaataaacggtaccaaagatacataccaagatagattttcagtaccggttaaaataaacggtactaaagatacataccaaatcaaaaaaaaatgtgtgggatgtgggcattcgaactcaagatctctcagctcaaccctcactcgtgttaccattacacctaatacacacatataacttggatagatatgctttctttttaacctaatcctggaggcatttttagtggtaccaaaaatatctttagtcgtctgggttggtgctatcaaccagtattaaaaataaattttcagtccggactggtattaccaaccgggaggaaagatcctacagcattagtctcggttggtgttaccaaccagtactaaaaatgtaccgagactaaaaatgtttccagcgacttggagtgctttagtaccggttcttaatctagccaaaatatttatgattttgggtactacgacgaaatatcagttctctagaagtggttgtcagcagtgttctcattgttctagttttcttcgttgccaatcgccattatctatggacgagttacattgtgggatacatccggccaccatccttaccgttgtttggtgaattggaaaattttaatatctgtcaaagaaatgagtatgtgttcagaattagtgatatgattttcatctataggctaaaataagttttttaaaaaaaatttatagccaattttcagttgtttttccatttacagtaatagttttactatttgatccaataaaaattgttggaaattgtaattttccatcgtactgaattatttagagctaaatgaaaaaaaaatgaggacttagcactatattgaattatcgtttcggtcaaagttatctgtagtttcatgttattatttctataattgtattttcttcatcatttatgtccagttgtaatatatggtttaggattttaatttatgatgaatgttatttagaaccagttgcaatgcgcgggacattacactagttaaatatataagtgagtgaagagagatttggagaagaaaagtggataccaagatactgtacgtagtagccttgcaaaagtgcacacataccagtgtacttattagtaactgtgttttttctccaagcacgtatatttattcatttattgatataacatacacttattgtagatagcagttgccactgatacatcgattcagcttcatgatcgctgtggattggtggagctagctatggctagctccggcgccgccttagcagcagcggtggcaatctcccctgtagccgcggtggcagcacccccaacggcagccgtgccaatgcgggttgtggtggtggcctgggcctggtgggtagtaaccaccgttccaaggtgggtagtagccgccgccgccaccacctcctcctcctcctcctcctccgccacctcctcctcctcctccgccgccgccgcccccgcctcctcctcttcctccgccgcctcctcctcctccgccgccgccgccgcccccgcctcctcctcctcctcctcctcctccaccaccgccaccgccaccgccgcatccctgcttgttggcctctgtatgcacggatgggtgggcgtacatcacatacatatacatggaacatcgattgatgcaaacatacgtgaaggagtgaaatctaattattaactataattctatatataaacatataaacgagcgtatgcaatgtgtaaatcctatatacgcaaaagtaaacatagatatgtagctagctatagtgtgtgcgctcacgagggtcttgggctgaggcgacgaagcagaaagcagcaacgaggagaagggtgaacacaatgagagccttacgcgccatgtatgcttggtttttttggtttgatctgataactgatgactgatgagaaacttggacgaaaaccaagcgtatttataggcagaatgaaggctgctgatcgtggactcgaggtcaatcgagtagttgatgacgatatatcagccctagctcgttgacactctcaactctcgatcaatctagctatattctatactatatatgttgcgagtggaaattcctgccatcatgttaactgactgtgtagatagatttggtcggatttaacaaagtccggtagctagatttggtcggattttgacaaggtttaatcgttgcatgcacccatttgaaaagagtcaaatatgagtggacgagatagaatgtttttcccaaccctatctagacaaacatatacatattcctaattaatttactggagtaagggtgtaagagagagataaacccaagtgccttaagtcaaaataagaaggccgaaatgtagagcttgcatgctgtaaataattcttgactccagatgtacgataatcttcttttgagtaatgttactgagataggaatgattgactttgctgcaaactacccgatcgattgtggtttggttttagccttgttggtgttaattttccgtttgtttttaattagagaatttatacggtacaatatactaatatactaatagtatacactgctagtataagcaatctaatggtgtagattgatctgatcttccacttaaatagattgtagtataaaatttataagggtaaattagtttttctttttattctgtggcatcaattttttttaaaaaagaaagtaatgatctaggtaaaaaaaaatgataccattgttgggttgtatatgaatgtgttaacctagctagcaagattcaaaatgtgtaaggtgtttcatgcacatctgctatatatggtacaaaacttacataattaccggtaattggtcaagtatgcatatttttttaatgatgatcaatattgaccatgaatcgtgccactacaacgcatgccatcgtctctcataggcgcaaaaacaagatccagcgatggcgccgttacgcatgaacaagtttcgattggaccgaattaactcacaacaacgaaattacttaaaatccctttccaatttcatatataaatttctaatttaccatctatatactgacaatatatactaacattgtattgtactttaaaagttctctttaattaattaattatggccgatttgatatcctcctgaatgttacaacgcgatgtgtccatccatctatgttcaaacttttgcttagctgattagtgagaagcctttaggttagtaactggagctaattaccgctatcatgttaaagaaacaatataattacggaagaacattttttaacatagggctgagaataattgctctgacatttgttgtcaaatctaaaagtatcatgcttaggatgtcataccggacaaatcaagataaggactcgatcgactatatatccatagattatatgataatgcacctttacacaattctccagcgctggatatactcgttctaccatgaaggatataatataacccaaccaaaaacaacgtacgcggaatttaatctagctagccacatcaaacttttggtgcgtacggctcgtacctttttttcatgaaaaacctgacgtacatatgttcaaattccgtttgcgcaggcacgccgtatcgatcgaaaagaaaatgcatgtaagatgtgaacttgctcgagctgacagcactgaggtggtagtagttgtacttacgatcaaacttgttagcccacgctgagtcagccgtcacgtgggacaaaaccagggtgaaaaccgccgagagacctattgtgaccggttttgtaagttggggaatgccggatgtctggttttacggttgagagacgattatgtatctggctaacaagttgagggaccttgcgtgtacttttcctgtcccgtgggtgaccgttcaagtaaccgtgacgcgttcaagtgtcaccgccataggccgacggaatgcacgctatcgcgcgtacgtctagcgtgattgcatgagcagcccagcccagacgtgctgcggccctgaaggttcgaccgtgcaaaactagttttttccttttttttgattgtcgagttattgttacctttcttcttttgtgatttcttgaatttcggaatcagagtgctattcacctgcatgatgctcatgtgccatattaaattgatatcaaaaagaaattgtgggaaccactcgtcatggacactatcgttgtatatcgcacctcgtccacgaggtccccttccacctcgagcttggggtttccttcggccgacagcggaggcgacctccctagcttgaatacatgcagcggagggtggcgcaattggtatcgatcatacaacagtaatcctcacactcgggaaggagcagagccgtggtagtggtggaactcagggtgtttgcagggtgaaggcggagaggagctcatgaagtggagatccgcgttccctatggctcccatgagccggtgggggttggatgagcgtctccaactatcctcaaccgtgcatgctatcttcttctaacaacttgatttgtgacaagttgacattgtgaagactgccgccgtcattgccaccactcttctctttgagatcgggaggtcagcagcatgagagatggagcccgtcaggaagaggctcatgggtagtacatgagcgaaaaaagggaggtggcaaccatgcaagctggcatgttttattttatcgctaaattttcttgtaggtgtcatgaaggtatgaaccatgcaccttggtttctactatgtggtaaattagacggtttcaaaaaggggtgttggatactcatactcggtttcaaagttaaggggatgtgttttagaatttagacacacacaactaaggggggtcaattggacttatcttttttttttcttgccaagaaagataagtgttattgccttattggattattgtaggagtttgtttcagacaaacgtgattgttgaggtagtcaattggattttttttcttaactaaaaaacatacccgtacgttgcaacgggtgaaaactattttaatcttattattgttcaatgtgaaatttacttgcatatataattttctagaaaatcatgttaagttagcatgtgaatttttttaagagatttaatatacgactccttatgtattttcaaaagcgaacaaatttaaaacctgacttaaatacagatctgtatttctaaaaacaaacgaattaaaaaaccgactcatacacggatgacgtattaaagatctgataaatgcgaaaaaaggagttggtcaatctcgtgggtgaggttgttcactttgctctacatttatgcaatgcgaatggcgacctgcttgcttgttgcggcggcaagcaaagagaccatcttcccacggtaatgggagaagctcgtttcgctcgtatgagcccatggggccctaaacttagagcgcaggtacctcgtaacactgtcaaggggagcctaggatccttgcagtctctttaatttttctctttcccttcagcccaacaagagaacagcccatcacacaacttcgccaactccttttacccctcaaatcaaagccgaggttacaagcctgcgccaccaggcccggcgatcgaatcgcaggcgcgcccctatttatccaggtgtcgagcggtgagaatttcccgtgtggtacaaaactgttccgtgtgaggcgcccgtaaattaaccgaggaggatccgcctctgattcgattatatggcgcggtttttgtcacgtatgtacgcagaaattaacgtgcacgtagagtcgcgtactgattagatcaagctatcaacgacgcatttgcggctttgcgcatgcatgcgacaagacgcgattggttgaacagctcatgcgcggtgcatatgccccgcatgtgcaaagtatatgatgtggtttcgggaggacggtacacacacatgtgcgatctgtgcgaattacatgcatttgctcattagggaaaacagatcatctgtgaccgttaaaaaaatgctactaccaccatttcatcatattataagttgtttttactttttttttcaccaagtttataaaaaacatagtagctttttaacacaaaataaacttattatcaaaatatatttagtactagatttaatgaaactaatttattgttttaaatgtttctaattttaaatttagtcaaactcaataaagtttaagtagaaaaatatcaaaacgacttataacataaatcgggggagtaccacgtactaacagcttggcaaactgataatttggtactaaatgacaacatctccttttgttaagaaaaaaagttttttaaaagaaaaagcagataagtctgttaatttttttaatcaaataagtttgttaatttggtcagtaatcctgcttccccactgcttgagtggctcgctggttcgggcggccacaaggacgattatagcggggctctttttgttcccgccttttcggtgtgaggtttctttcttccttaatgcggagctttctctcccatgtgttctaggtcagtcaactcagccgcgatgggggaggccatggtgccacccggatccgcacgctacgcgatcggatccggtgtttcctcagtggagatgatggatgtaggtgtggtggggctacggacaacggtgatgtagcaatctaggcgttggctcagggtgtggacaatgaggcagagtcaggttgcggttgatgtaacaagcttgccgcatgtagtggtgaggtcaccggcgatgttgagaacaacgatgcggatacctggcaaagcccgaagaaacctagtgccaccactatggatggccatgtgttgtagcgacggcgtgaaacatgggcagtgctgcatacttgtcctcatatgggcctgggcaccgagggctttgtccttgagaggtctaggacggcagcggcttgtgctagtttctagggttttcccctggttttttctcctccttttgcctagatctggaagcactactactacaaaaaaacaaaacctaatatggaccagctcataggtgttgattcacttaaaactagcacctactgactgttttccacctccatgggatgaaaaaaaatatagaacgacacctttgagcaactatatgtgtcggtactaaagaaaaaccagcacccataaaaatcgagctaagccggtggggtgggagattctttttagccccacactcgcaagttgtacttatacactatcaccaacaccttcgctctctccctctcgttttctcctctcgtctcgtctccctcctcctgcgagttgtccttatagactctcactgacaccttcactctctccctcttgttttctcgtctcgtctccctcctcctgtgaacccatcgctgcggttgtggggcgggtcatcatcatggctagcagcggggcgacgcggaggacgacagaggcggtcgtgagagtcctcggcctaatcctctctctctctctctctctctctctctctctcgatccactttcccgaagagctgacaagtaacacgacgatggtggcccatctctcctcaacgtcattacgatggcagcgatcacggctccgtcaggtcctcgtcctcccgccaccattggccatggcgtcaggctccacagttagattcgtcagcaacggtgatggcggtggcactaatgccacattcggcaggtttgagtttagggaccgctggatctagtcctccctggtgctcgacgtcaaccacggcgagtggcgacacctctcctcggcagcaatgacagcattctcccctcatccccacctctccatgagcaacggcggcggcggtccacatgactaacatgtatgtaacccctcctttctttccccatccccctccctgatatcttccaccatcccccagatttaactatggtcttctggatttgagcagtggtggtgagcagcaactgtatcctttgcctcttatgaacagcgtcagtggcgacggacaatggccttggcctttgataggcggtgatggccctggtctctggtgagataaggcgatggaggcttccatgtattgatttgtgatttagtttttgggatgaatgttatgtgtgcaattttctaggatgattttggttcattgttgttggatttgtgatttttttattcaatttgtgtgcatgttctttgctcgaagtagccgaagcatcgagccaacattttttcattcctagaatcttaaaggtgccagtttctaaattgggacctttgattctccacatcagtgccatctgagtggtatcggctaggaaatccgacatatatgagggttttccaattggcacaaaagtgtatttctgtagtagtgaagctccccattcattaggctatagaacaatgaaggcgacattatggatgtgacgacatcagtggactcgaggccgttgccagtgacgatggggacaactggttctagcctcccttgtgcagatatagcggcggccctactaggcacgttggtgttgggcacaacggcagtggtaggcaaacatggatgccctcatgtagatgcatatggcattcgcacgacaattgttcaaaggcaggatggaggcttgcggtgatgacaacagggtcggactagatcctcaccttccccctccttcccccctcccctcctctcatgcttggtcgtctatggtgggtagttccctatgggatggtgagtgtcggttgataggatttttccggtgtaattgaagaatgcttcagggtagtgtgtatcggcatggatgaaccacttcaggctttgttctatggaatgtgttgaggaggttgcgagagtttgtgttgtttttaaagattacgtcagtgctgctttcaacgtgacaagtcttgtcaataaccatattgatatttggtacaacgatcctaacatcaaagtttctaattgaacgatgtgtcggatcgttagcaaggacgtcttagaacatttgaagctttgtcgtctagtttttctttcatgtattttggtgtcccttgggtacgaggcatggagtataaatattcctatatataaattttagctatgtatatccacccgtggatatagaggccggattgctatccgttaatctaaaaaatatcaaagctaccttaagtgtgacttatatttttcatatttgcattgaatttttaatacaaataagagcgaaatattatgtcaaaatgtcaatggcgtcatatatttaaaaacaaaaggcacaatgctcatcgccgccacaatgcatcggtgcttgacttcatcatcgtaattttgcttagataggaggccaagggaagtgtcaccatgcttgtcaaagttgtgttggtcaccaccaaccaagctctaccatctttctccctagttatgcacagccactcgttgatgtcgccagacaatcaacattggcatccgcccctcctcttaatcaccacgtctagtcgtagcctcaagctcgaagctgtcgtatctagcaatcttaaactccaaagctagcgaaaaggaggggcaagaagcaaagagggagacgggggaggaggtggtcatccttggtaaaggaggagatcatgcaacgccaggacgtcgtagcccatcttccaccttttttgtgtcccaaagtcatcgccctctcaccattcatgtgaggttcaacttaaaaatacatgtcaagatttatagctacggttgattttttgaacgagggtgtaggtgacagtagctaactagaaaaggaactactccgagtagaacaaatcaccgccctcatccctctagttctcggaatgaatccaaagaggaaaaccgatggctttattgaaagagttgtgatgtgcatttgcaagatcaagacgagatccgcaatgcagattttggcctggtatggtgacatcccgatgggttcggtgtgcatcccagaagttggatagcctaggccacaggacggggtggaccaggtgtccaggacattttttttaagaactcatgccttttttggtttagctaagttagattacatgaatggttatagtacatcgaacacagatctggatagggatacattcagttttgcaaagaagcctcttaacaatgggcatattacactttccaactatagtttgcaaagaaggacttagaaagaaatgaaaaacgcaatcaggtccttcttgaactgcttgcagcatcaacttcaagcttgattccggtagaacttgaaacaaaacaaggtgatgcatatgattgattcaccacataatccaaaaaggggcctcacacatatggaggttcaagcgatggtatacaaatcgaaatctcaaccacacaacagaaaatttccaccgaagtccaaacaaagacgcaacagaaacagttccaaaaatcaagcttagatccatagcactagcgaaatatggtgaagaaacataggaatctgcataaaaaaaccgaggaccatacccaaaagaggcctccatatatagaaggtcggggtcaactcggcttgactcgacaccatcaaccacctcacgaagaacttccgtcggagatgaagaaggcctccacccttggaacgagctctcccgatatgtcggtgtagaccaggcgtaacctctcctcgtgcagatcttgaggcaccctaaccaacaagactcaagaaccacaagaacaaaagcaaaagcaactgaaaaagtccaaacaaatggtaagacccgactaaaacaactactactaacactaagacgtctgaccactcttccaccctctatcggcaacgaaccatcggagagaaaaaggaaaaggggtcggagaaggaagagtgctactgttggggaaattcgggagagaccctggaagagacccccacgaagaaagtcccattcgagacattaccaaactgaagtaagtttagtaagaaggtttttctctgtttctctttctctctctttctcttttgacaaggcttggtaaagttcgtgcaaattgtgaagaaacaacatggtcgcctggtcgatgtgggattaaaatcattagccttcaaaggcaccatatctttgtcagtgacaagtggatccatgattcatcgggcccatatgtcggtgacaaaggcacgtacctccttcgaaggtagaggaggctgatccgtcggtgtggtgatgctaccccaaagttgaaacctcgtcaactgttccgtttgccgcagcagaattccatccgatatgcttcctcatcacctacacgcccaaacatttcccccatattcgaaacgtataaccgagatgcagtgatgcacacaaaagaggaacctcaaacccacacaacgaagtacaacacaccgtgacgcccacaggccagttcaagtcccaaacgtccggatcctcccatcctattccttcgccgagaaggccctgacgactgacgtgcagtgccagcacgcaccgcaccgttggatcttggatgctcctcccacgaagccaagtgcggagacgcggacgccagccaacgccaattagctgtccgcgtcagttacgtttccgtttcccccttcacgctaacaaaattccccttcttctctcctctctcctctctcctcgtcatcctctcccttcccccaactcccctcgccggatcgttcgcgatcaatccgccgccgccgcttttctcctccgatccagcgccgccccccgagggagaatcttccgccgccgcggccgcaccccgcaccctcacgcagtagggatcgaggatgtcgtacgcgtacctcttcaagtacatcatcatcggcgacacaggtgcgcgctccctcccctctttccttggattggatccggccgcgccgccgccggtgccggggagatctgccccgccgcggagcatctggtgtggtttagattgatttggtctcgtctgggtctgatcgggttttggtttttttgctttgcgtcaccctgcaggcgtggggaagtcgtgcctgctgctgcagttcacggacaagaggttccagcccgtgcacgacctcaccatcggcgtcgagttcggcgcccgcatgatcaccatcgacaacaagcccatcaagctccagatttgggacacggtccgtactcttccccttcccttctccggttctccccctccttgtagcttgcgtagtacgcttgtgatgtagggttaaccgaatcgacacatgtattcggtgtcaagaaacgtattcgattttttttggtaattgcctcagcgatgcctatcctttgtttatgttcatgttgccaaactattctgtgcagttgatgatgtggtgatgattttgctatcgcgtagcttttgggtagtttctattgtggtggctttcgtgtagcgaaatgcgttatcctttgctaatgtaccaaaaatgtgtaaatatttgtggaatctcacaaaattataatatgctaggaattgttttacacaaatatactctatcatacttatgaggtaaatcgaaatgctcacagaggtattgttgacctgacttttaacagttgaacttcatatgagtgacactgatatttaagaaaaagaaaaggtctcacatctctgctgagttcctaaaaccatgggtatcagttcatccttgtgagtggttttgttcatcatatcatgcccatattagccttttttttatttacataacagggttaggcagtaaagaattcttaattaaaatgccatacggtgaagcatttatgttttgggtctgcctgtacagctaaatgactttcttgagtttgttgtcatgacacacacccatctcatactattctctcgcaataatgcaggctggtcaagaatcgttcagatctataactagatcatactacaggggtgctgctggtgcccttttggtgtatgatatcaccaggtgcatgttaaatgcaatatattgcttatgatcttaactttcttaatatggatattgctcacagttggctaacttaaacttcaggagagagacttttaatcatcttgctagctggctagaagatgcaagacagcatgcaaatgccaacatgacagtaatgcttattggtaacaaatgtgatctgtctcatagacgtgctgtcagctatgaggaaggtgaacaatttgccaaggagcatggcctagtatttatggaggcatctgcaaaaactgcacaaaatgttgaggaggtgattgtttgtccctggtacatttgagtttggttgcagggttcatttctcttgaaaacttatcgtgtgtcttcttgtgatgtaggcattcatcaagactgctggaacaatttacaagaaaatccaagatggtgtctttgatgtatctaatgaggtgagctttttattgcttgccccttttcccttttaaactctcagttcagtttgtgctaatcaaagataattagtggaatgtaattgaattcaatcttgttcgtaagttgcaatggcaccatacatcggtcatgctatgttttgaacccccaaaagaacaagttgacatttttttctgaactacatgtataggatgatactatctgtgaattcgacacacctcttctatttgattacaagttttattgttaagttctccagttagtattgattaatgaatagaaagctgtggtgttgtattctagactattgacaagtaataacatatacatgaaactattctgatagagaggttggttggagtgtcaatgtgccagctggctcccctcttatcacatgatttttcttttccagttcagcaaccactttatcaatattctcgcattttaaggaagtatgatatattatatttcacagctactaacttatcttccaaaactgctgcagtcttatgggatcaaagttggctatgcggtaccaaatgcttcaggtggtggagctggctcatcctctcaaggtggtggctgctgcggctaaaggcagcagcagtatccaactagtcatgtatccagcctaaattgaaaagtcagatcatgtgtaacatggccctcaatatttcgatgttgccttgtggaaaaaatagctggtattggtactgtgttttttactccttccagctaccgacgttcagtgttagtgcacaaaatgttcatccatggtagtttgtctacattgcagtcatgtaaagttaaacattcacgatttctgtacttttgcatgtgtaactaaatgaaatggtgtgttacattcattccttcaatcaaataatccatagaaacaaactggtttgtaactattgtaactagtcgctagtgtccatggtattttcgattgtggaacataattagtttaatctgcttcagtataacttaagccggctttatcctgtgtatgcatcagcttcgctccattgaacatccaaacatcagtataagcattttgtggcgactaatcatccggagatagggcaatgctttctaccaactgaagagtagagacgtgatgctgtgagatggaatgcaaatttcgcatattagtaagaagttggggaaggattcgaccactcactgagaagctagagcatcatggcacagtaattacaatgtaacgtagcatattcttgaacaagaacatctggtcaaataccaaccgggaaaaaatccacatcgataaagaggtgccgagtgcttacatcaacgtctttgccataatcagaacactactccgtacaagctaacacgagagcagagattacatttgcacggatgcaaaagtttccaagatagggaactggagtgaagctcagcgtcccctgccacgaccgcgcccacgaccacggccgcgcccacgccccaaaggcttccctgtttccggattaaggtttgatcagacaaacagttcagcagctcagtaaaatcaacttagagagacaaaacaattatcaaacctgcagttggcttcttagccttgaccctcggtgtatcctcaaccagcaatgtctccaggtttaagctgtcaggaagaatgtaatagcgaatgttgtttcccctcacactgaggtgatcaaaggtaacaggatttttccctttcaatgtgagtttcacagttttcaggtgcgtgttcatgctgatatcaacacctacaaaatagacctggaagttaggatgtgcatatggagtataatggagtcacttatggaggtgattataggcatgaccgcatgagaatagctctgctgaaacaaaaggcaatgcaaattaattataacaagtgcatgaaagacttatggtgggtttgaggaaaatgtaaagagttgtaaaaagtataaattgagatagataagagaaagtagaagggctggaatagattgcctattctgcttgtattgttgatacagtgttcagagactaatttatgaaaaagaagggtccaaaaactttttctgatagtttccagacccggactaatattgtttgtgatttctgtgctaactgatatatttactaggctattctgttccgctaatctagaatcatcagaatattagtattgatattatgcctatttgatcagagtcgatcaatttctgtctgtccgattgcagcatacagactattagtttgggatatactttgatgatccaacaaaatgttcactgtcgatattgtgtatattttatttgttaggtcaatttctgactatctgaatgcagcattacaagatccaaggaaatagctactatagatatgttagagctgagatgatctattgtattggtaaatgcattggattaaatcttctttgcagataaatttaaatgcacctgttgcttcaacctgtagcatgtttcatgtgtatcacaagtgatgttttgaacagatcaacagactattaccacctatgcacatgtgaccttagagtgacttctcctgatcaaatttggttattaagattaagagtggcgcattaggttcaaggtaagccttgacgctggagcactgaaaaatgggagagcactgcttcttaatccttctgcagtagaaatcaatgcataacctacctatggcctctgaataactgcagcacaagtgctaaactatgttcattgaacttaagcattgcatatgttcatgtacttatcatgaagtcaaaatattggcaacctagtgtaacataacaatgatagatcaaatcaaatactcttcataatacactagaagccaaataatgatataaatttatgaacatgatatacgcatatatatcagtccattcttgcatccaaatttatgtatgatttgtttcagattttcaatgttggttaacaatatcaagtatatgccatcttttacttcaatgacatgctttctaattcccttttctgatttttttggtgcagggtatggaaaagggataacctgttaaaggttaattgttttgatggaaagcatggatgaagctttgcagcaaatgattgttttctaaaagagattctgcatacaattgttgcatactacaataaggtggttatgcccaataaggatgaaaagttgaaaacctcaagtataagctgctgatgctaaaaatgttcatggcacgtgtaatattgatatcaaagaagataaattgtttcagtagtaagactttgataaacactactctaacataagcaagatgccagcaaatagtagacttgatcaggctggccaagaataggctaccactgtcagtgagaccatatgtgaaggcaaatgcagatgccacattattcagttattgttccacacatatcatagcttggataaaataagtaaatcatagcagacttcctttagcatggtgttatcttatgaattcctaaactcgtttgaagcttagtacttatcctctgtcagcgatctctttaattagcaggaaaactaggatgcagctgccagctagcaaaacgtttaaaatggtcacatttggggttacataattattgtgtattgccaagtcatccaactagatatgctgctaggaacacagagaaattggcaccgaggatgtcagcagagtagaacgataaaccccttctctaagacattgaccacaagaagccaaactggtgtctggtgctgatgccaaaaggaaaagatggtgctggtgccaaaaggagaaggcagcaaatgttcaatccaattgcttcaagggatgatgattcttaggagtcaaaggaagttctacctgtactacatgacatacctatcatagctggtcatgatctgttggaagcatatggtcttttcagttgtagtgatggcactttttcatgagattgagtgagaggctgctgttgaatcaatttgaaccacaaaggttttccctttgagctacaatataataaaatgcaactgtgctagtcaaacaccctagatttgctccgcatcgtcacgaaaacaaaagcttcagcacaaaggcctcctagtgtttctaccgaatccgccattgaaatgcaaccacagcgccaatcaatcaaatcccgcgccacatagacaacacagacgccgctcgcaaaccctagtaacgcgccgccaaaaagaacaacaacaacaaaaaaaaaaggtcgccaagacatcgtaccagtgatggtgccatggacggtggtgccgttcttgagctcgatcgttaccgtctcgttgttcagcttcatcaagaacctgcacccgaattcggcgggagaaatcgcacgggaaacgaaccagttaaccacaaaaaaaggagaaaaaaaaacaaatctgggaaggggagagcgaagcgggagccgcggattacctgacgagcttcatcttggaggcgcctggtggggggaggaaggcgagggggggagaggcggtgccgaagcctgagctagggtttttgggggggagctgcctcctcgagcggcttctctcctcggagagaggaagaaagaggggaagccgccataaaacctccccgatctgggagagaggccgcgagatgggcttttactgggccggattgcaatatgggctttttcatgggctgttctgtaattgggcctcggttatcgatagtgtcagtacacaattacatatatatgtaatggttgagtattggtattgtatcctggtatttattgtacaggattttcctgactattgtgtgatcagcaagcagtgtaccccttgctggaaaataataatgagccatgagccatcccttgatcgctctgagaaagttataacaagtgtgggcatccttgatgagctgagctatggaggaatgatgttacaagtaggagtatgcttcaccagcagtaagatcaattcatttttgttataaatgtttcatacatattaggttgggcttctatcatatcaaaatcttggtggttggattcatataccatgattctcttgctataaatctcctattatttgattcatagataagatggctatagtaatagcggtggtccaccgggttagggttttgaggttggagatatgggtggctatgcgaagtacggaaaccgtctaggctgtagtgacaatattgtagctataggttcgaaagtcgggcattggattgtgccaatataggaatatcggaaaagacaatagtttggttgcgtcaaatggatatccaatggcaaaagccacctaagaacgaggaggagaaaggtgtgaggacaacgaataagagaaagaacatcacaagaagagcaatggggaggcgagcgaagcaaggtacgtaaatgacaaaagtttgtttttgggaggacgctctgttgttaacggaagtctggcatgtttagctgttattgaaggcacatgacacttgacttgaataatgaagtagggctctactagtagagcaacatacgatgtgtatttggcttgcagaggaatgagtgtgcgggtgcgagtgcgggttgggtggagagattacccacacgaatcaataacaataacccacatatatccaaatctgacaaattaaattgatttcgtgaaatcttcggtctgcacactggtatcacatattcatcacatccaaagaaatatttatagcatttaatttcctcatataaatatatttttccccaccagaaaatacaatcttcttttcccacacataagggatgcccagccggactccatttcttaaggaaaaaccattcaacagaaaaagttggaaaaaaggttaaaaaggtacccctttttattacggaaaatccccattaattaattaatctctatgccatgtccccgactcaagtccaaactcccacccccgctcacagttgctctcgacgccgtcgcgcgcgctgcatgccatccatggccaccgcagcgcgctctcctcgtgggcgcgcgcggcgccttgcttagctaagcttcacacatctccccccacccctgccacgcgtggtcgcgcgctcgctgacgtagcagatcgcgcccggccggcggcggaggggaggagatgacgatggtcaggcaggcggaggcggtgggggtgggggtgggggtggagccgtcgtctgccctgggacggaagcgctccgcctccgcctcgtcgaggccgacgacggcgcgcgggcgcggcgcgttcggcgtgaggagcgtggtgttctccgtcggcgggatgtcttcctcggcgaggcggaggctggcggcgcggctcaggtcggagctcgcgggcgtccgcgcgctcctcgcgaaggcggcggggttcttggcccccgagggcgcggctccttcctcgtcgccgccggcggcggctccctgcggcggggggaggaaggatggacggttcttggccaccgccgggatccgatccggtggtgcaccggcggtggacgctggcggcgagaattccgggaggaagaggaaggtttcgtttctcttggagcggacagacgacgcgccgatggagatggcgccggatgggaggacgcggctcgccgctcgctctgcgtcgctctcgccgtcgccgccgccgccgccgccgcgacagcaccaagcagcagatggcaagatcggcgtcgaggaggaagaggacgtcgacatctgcggcggcgcctccccgttggcaaccgcgccgatgtctcctctcttccctgacgtcgatctcagcgagctcgtcggtgcaaccggagcgaagctgctctcgccgctgcaacgcaagtacattgcgctcgccgacgccgagcgcgccgatgcacgcggcggcgcctccaccgtcgcgccgccggcattgtctcctctcctcccagctggatacagcgagctcgtcggtgcaaccggagtcgacctgctctcgccgctgccgcgcgaacacgtcgcgctcgccgatcgcgccgacgcccttggtctcggtctcgtcgtctccgccaccgcgacgacgacgtcgccgtctctgcctcctggtttcgctgaactcgccatcgccgatgcaggcggaaccaaaatgctgtcgccgctgccgcgcaaatacgtcgcgctcgccgagcgcggcggcgtcgcctccaccgcgacgacattgccttccctcgatgagctcgccgacgcaaccggggtcaaaatgctgtcgccgttgccgcgcaagtacgtcgcgctcgccgaggaagaggacgacgagtacgtcgacatctgcggcgacgcctccccagtggtgctacacaagaatcatggcgagatcatcatcagcaacagcagcagcagcagcccaagcagcgactctgactcggactcaaacagcagctccagctccagctccagcagcagcagcagcagcagcagcagcgattcagactccgacgagagcgccgccgcggctacacatgcgccggcgatccccaccaatgcgtgcgtcagttccgcgcaaccgtcgtcggcggcgcctgcagcgccggaggtagcacagagcgctaaaaaacaagaagagaagctcccggaccagcgcaccgccgcagccgccgccgccgccgtcgtcgcgacggcgccgccgaagccactgaccgacctgatcaccagagcccagggagccgcggcgaggcggcggcaggacgagaaggcgcaggcgagggagaaggcccgtcaagaactgcgcgagatggagaggacgacagcgcccgccatggccagaaacttcatacacccgctggacatgaagctgctcggcctcgccgccgtcgagcacatggtgagcgccgacgaggaggctcgctgcagggcgcttcgctccgccgcgcccagccttctggagaagctcgggctcttcctgaaggccgatgacggtggcgacaaggtgcagcggcagcagcagccgagcttcgtcgccggcgacgatgacgacgtcgaggaaggtgagattcggtagcgccgcgccaggaagaagacatgattgatttgaatgtatgtgtgtggctccagatatgtgccgggaaaacactgtcggtttctccagagagaacttttttttttgagggatatgaaatcaccaaattcgattaacatttgggacaaaagtgcattgaaaagttcaaacagattttgattgtttgaacgaattttgggaaggccaaaaaaaaaaaggaatcaccaagcgtggattttgtatcggcggcaggttagcacagttggacaggcctgatcctgctcggcccgtgggccttgttgtgtgggccagaggttgcagcgtttgatcaccatctacctgagaaataagttcactttgattccccttaaactagtatccttaaaccataatatcggatacctagtatccgtaaaccacaatatcggatacctataactattaaaaccggtacaatttaacttactcagtggttttgaaggatggtttcgttgacgtaatgtctatatggcggtgttgacatgatcttcggtcaatgtggcgatgacgattcatatggcaaaataaatgggaccctagtcgctaggtcgcttcggcggctggggcgtgaacggcgaggtggacgccaccggattgaggcagtctgcggggggcggcatcgccggcgtggagtgcttcccgatggaagaagaggagctaaagaagaaatagaggaggggcagtcaccaaaatttctagcccttcccaaagactagcatctgttcacacgactatgacatctctatctattaaaaatatttatatattgtttatgttaattaatggacatatatgtttaataacaattaataataaatatgttttaacatattttttaagtagtgtagctataacataaatggatttatatatcttgatttgtcattaagaatatcatcgtaacaacaaataatttatcatatattaccgcgaccattacctcctacaatatttaaatatttaaatgtgtcaattgtagtagcaatgtaaaaggccacatttcttatacgttgcaattctgtcatcaccagttgagaagaatctatacgattttttttataatcatatgattttttttataagtcgtaaaacttataatcatatgatttaaatcaactttgcaaaatttattatatcgtccatgtcacatgtttttttaattggaaaaatttgctacaggacactccaaaaaacacgtaattagctgagggacatcgagaaaacgtggaactgccccagaacactacaaaatttgtgaaatttgtcgtaggataccaagctcattattttatcatttcccggctgaaagtgacgtgtactttttcaaaatgcccagattgcccctgcatcccaatctataccgacgcgcggtccggtcgaaccaaactcggtcacacggacacacggttggatgttggatggaggagcaatttcgcaatcaagaacctggttgcggcttcatcgccggctgcgacgcgctgctctcgccgccggggaggcccatctccacgtcgcagttggcctgcaccggcgccggcgggggcgtcgcgccgctgcagcccagcaaccgccgcagggccgctatcctcaccgcttccacgatgacggcgacttcagcgatgggtcccgccgacggctgcggcgggacggccggtagttgatgatgatgccgcgacggcgccgtctgtcctggcggatcaccagctcctgccggtgcatcatcgtctccttctcccccgtgtgttgcaggcagatctcgtgctccgtcgtcgtcgtcgtcgtcgccgccagagccggtagcctgctcgtcccgccgccagagacgacggtcaccgtcgccatgggagtcggcatgctgatgttgcgctcgaggccggtggtgtagtcggtgaaggagtagacgaggtaggcggctgtcacaccctgaagttcttttcccaaacctaaattgaatttataaatgacctcaagaaaataccggtgtaaaagcaagagcgaaaccctaataaattaatgcaaataataatcggaattggcatgtggaatttttcttgagttctacatgtcgaaatgtgctaacaagatttttagtggaattttcagagctctagaaataattttaaccaattaaaattgagcacaagtaatatttaatcccaggaaattcatttccttccttttctttttccttttccctcctttttcttttttcgaatgggccgccggcccattctcttcctctccccttccccgctgggctggccgaaggccaaggcccagcagccggccgcctccttcctcctctcttcgggtcgccgacaggtggggcccacctgtcgggcccgtctcccacctccagccggcaccgccgcatcccgcaaccgccgccccgctcgctcccgcgtctcccgggccacgtcgcccacgccgccgcccgcgcccactccctctctctcccgcccacgcccgcgctcgagacggccgggattcaatttttgaatcctgcctctctctcctccccacctctccccactccgccggcgaaatcgcggtcaccctggccacgatcgaccctcgtgagcctatataaagcacccttattccctcctctctctttttcgttttgcaatcgtctgctcccgtgcactccacagccctagcgccatcgccctaatttctgtcgccgccgccatcgctccggccgccgctagccgccgctagccgctgcgccgtcgacgccgtcgcgttcgccgtcgtccgggccaccccgtccacccaactcccgtcggattccgccgccggaacccactccgcaccgtgcgccggtgagcaccgccatggccgctgccttcggccggcgtcctcgccctcttccctcttcctctctctctctctctctaacccctttcatcgtgttcgctaggtggttccggagctcgtcccgctgccgtcatcgccctccgtcgctcgccgtcgtcaaccgccgtcggtgagacacctcctccccttcctctctctctcccgcaccgcttaaccgccgcctagccgcttagctgccgctagccccgtccgtgtcaccgcgacgccgccgccctccgccgccggccggtcgccgccagtcgccgccgctgcgtcgagccgtgctgccgcgtgccatgggcgccgggccggtttgagccgtgcccatgcacgctggccgcgagccgcctccgccgtccgatctaccgggcggtagatcggggccatccaatcccgccgcccgcgtggctgccacatggccgccacgtgtgcgccacgtcggcgccacatgtgcaccacgtggtgtgccgcccctttcccggtccgtggacccagtccaccgcggacagccacccgattcactgccatgtgccatgtggggcccgcatgtcggcgccgccctctctctccccgggattttaattattgcgcaataaatcaattaaggatttttctgtttatagtaaaaacacagtgaatcttctaaaattcatatctaattcatccgagctccgtttaagcccattcaagtctcagtaaatcaagaaaaatgcatagaatccattaaaaatagttttgttctctgtttcagtaggcttatggcctgtttgtattgtttgctttgtatgtcgcttagattccggctctcccgatgttccggtgtactttgaaatagtcgtcgaggttcctccaggagcatagcaaggcaagtcatgcttgtcacttgaacatattgatcctatattgcaaatgctctatcattttcctttaagtactgcatcattttataatgttactgctctatcgtttttcacttgaacatgttttcctttaagtacggccagtgagaacgacaccaccttcagccacatgtgcgccgtgatgaggggaatggacaggatgcactctgacctgcacaaggcatccaaggccttgaatgatgggaagcttgtgaggatcatagctctgaaggatgagatagcacgcttgaagaaggaaaacgcttagttgaagggtctcccagcgccaggaggagtccagatccgcaccacgcctcgcaagtcaacgaatgcacccgtgcgcattcagcttgcgcccaggaacccacctcctcccgcagctcctccagcacctcccgcagttcccgcagcgcccgcagctccagctccagtcccagctcccgttccaatgtcatgtcagctcccgcgtccgctctctctttcgctccagcgtcagccgccaggggtccagccagtggcaacagaggttggttgcctgctactcccagtggcagccgcgaccacagcagcagcagttccagtggctcagagccgggcagcggcgagacgtatctgccagactccaggagccgctcagagggacctggcgacgagcaggaggacgccttcgactccaccgaccgcaggagccgttccgagcattaggctcgttttcccttagtttatcgactgcttagtaattgtctgttagtttgtgtgtttaggcttgttcgcttgtgggtcagtcgacggtcgacatcatgtgcctatgatgtggctgtcttaataaggatttgtttgctgttttaagtgttttaattcagatcagaacaattgtagtttaaattcctatataataaagcttagttcctgagcatctgtttttcttcttttccatcccctccgtctgctctcccttcagatggtcaacaccaggaatggcagccgtgtagcaggtgagggcagcaacggcaaagaatgcaccgacggtggatatcctaacagcgcctctggcaacggtccgccaccgctccccgagaacctgactcttgcacaagtgatggcccatcagactcagatgatggcggccatgatgcaacagatgcagcagcagcaccagcagatgcaccagaggatgtagcagcaagccgagcagcagcagcagcagtttggtccccctccccctcagtccaagctgccggagtttctacgcgtcaggccacccaccttctctagcaccaccaaccccatggaggcaaatgactggctccatgacatagagaagaagctcaatcttctgcagtgcaacgatcaggagaaggtcgccttcgccacacaccagctccagggtcccgcgtcagcttggtgggacaaccacatggctacccgcccgccaggcacagaagttacttgggcagagttctgtcgcagcttccggaaggcgcaagtgccagacggggtcgtggcacaaaagaagagagaattccgggcactccatcagggcaacaggacagtaacagagtatctgcatgagttcaatcgcctagcgtgatatgcaccggaggatgtccgcactgacgcagaaaagcaggagaagttcctagcaggcctggatgacgagctgaccaaccagttgatctccggggattacgctgacttcgagaagctgttagataaggcaatccgtcaggaggatcagcgcaacaaaatggacaggaagagaaaggtagcgcagttccggttcaaccaaggaagtcaccagcgaccacgcttcactcccgggcagcagggtagacctaccaccatgattgtccgccagcatcgccctttcaactcaagcagcttccaccagggcgccagtggcagccagaaccacccgggaggtcagcccaaccgcagtgcatctccgcgcccaccaatggccacagcacaggcagctccatcagtccaagccaagaaggagactggagcaaagccagggtcctgcttcaactgtggcgagcatggccactttgctgacaagtgcccgaagccaaggcgtgccgagccaaggtttgcccaagctcgtatcaaccacgcatccgtagaagaggcgcaagcagcaccagaggtcgtactgggtacgtttcctgtcaactcaatttctgcaaaagtacttttagattctggtgcgacgcattcattcatttcaaagaagtttgttggggtacatgggttaataagagaagaacttagtacaccaatgcaggttcatacccccgggaatagctccacctcggttcaattcagcccttctgtaacaatagaaatccaaagatcaccatttctagccaacctcatccttctcgaatccaaagatctagatgtcattcttgggatggattggctgaccaagttcaagggtgtcattgattgtgcgaatcgcacggtcaccttgaccaatgagaaaggggaaacagtggtgtacaagtcaccagtcgcactgaagcagggaatctccttaaatcagattgaggtggaaaatccggtggtcactgaggagaagagttcgaggaaattggaagatatccccatagtctgcgagtatctagaggtgttccttaaggacctcactaccatgccacccaagagagagattgaattccggattgatttggcaccggggactgctccaatttacaagagaccgtacagaatggcagccaacgagctagcagaggtcaagaagcaggttgatgagcaactgcagaaagggtacatttgaccaagtacttcaccttggggtgctccggtcatttttgtggagaagaaggacaagacgaagagaatgtgcgtcgattatcgcgcactcaatgaggtcaccatcaagaacaaataccctttgccgcagattgatgatctgtttgatcagctgaaaggagccagggtgttttccaaaatagacctgtgatcaggctaccatcagttgatgattcgggaagaggatattctcaagacagccttcaccactcggtatgggttgtatgagtgcacggttatgtcttttggacttaccaatacacctgcattcttcatgaacctgatgaacaaagtgttcatggaattttaatgcacattatgcttggaattctattcgggaatttctgggcgtgacagcggcgtaggtcgtcgctggagagaggagcgagagctgcagcttgccgatgatctccagccagcacacatccaagagctctgccacctcagggaacctgatgacgacgacgactccggcgatgggtcccgccgacggctgcacatggcggactccccggcggcgagctccatgatgccatccgctgagtggtgtgtggcaactgagtttgggacacggggcaatctaggcattttgaaaaaatactcgccactttcagctggaaaatgataaaataatgagctcagtgtcctacggcaaatttcacaaattttgtagtgtcctggggcagttccacgttttctcggtgtccctaagctagttacgcgtttttttggtatcctatagcacattttgcctttttaattttaagttgtagtgaattactattcatattttcccggatattgttgttgatacaatataattactattgaatactcagcggtgattattttataaggatgattctgaagatattttttcagtctcatatctttattaattggtaccacacattttattggatgtgcaaaatgagaaagctcattagcacatgattaattattatttttatattacacgacagacgtacacgcgcatgcacacaccatctattgaaagtccacctatatgtgcataatatttgtgggcacatggactttgaatcccggtcaccaacacaccactagtgcttccccgattaattacgtactccccgattaattacgtactccctctgttacaaaatataaggatttttataatagtgccaagtcaaatatttttaactttgactattaatagtaaaaaataaaaaaaatatcaatcatgtaaaattgatcttactagatttatgattaaacaaactatcataacatgcaactatttttatttaaaacattttacttttatagatattattggttaaagtagcatctcgaagatcgtgtcgaagtgaaaaatacttatattctgggacgagggagtattaaatattataaattttaaaaatggattcattcgttttttttaaaaaaattttatatagaaattattttaaaaaaactttaaaaaaacgtgctaccgtaaaacgagaaacttaaactttagagttgaataaagtctcgagtcaaaaaaagagagaaggaaaagagaagttgtaacgtcgtggatcgatcgatcgaaaccgtgtgctacaacagcccgcaggcaagcgaaggcccacaggcccaccttgagaaccagaaccagaagaagaacccgtccacttccattccacgcacgcgcacttcacgtgacgagaccatcgccacccccctccgccatccttcccaccgccgccgccaacgccgacgccgcccgacgaccgagccaacgcgaccagccagccgcccatgcctgcgcgcgcggcggcgctctcctgccgcggagtctccccgcacccccgcgcccactccctcctccctggccgccgccgccgccccgtcctccccttcgccggtaagcctcatcctcgaggttcctctcttctcactcgcgccccgcctgccgcaaggctagccctagcgctctgtgaggattgattcgtcataccgtatcgtcgtggggggaacagatgaggcggcggcggcgcccctacgtgtcagctccgtgccccattctcgggcttacggctgcggcggcggcggttacttcgtgcatctcgaagaccgcgatgacggagaggcgtctcggttgctgcgtgcccttcggcgagtccttcccgatcaccaggtaaggccatttaggcttcgattttggattgctgcgaaaacaagccagactgggtcaacaatccaatccaaccgtggaatcggtttgagatttagcatgacgcgtgaattgagcctttcatttgtgaggtgacatgacatgataattgacaaccccgttgatgccgtacacgcagtgagataaagcctgtaattggaaggcatttgtaacctgattgttgctcggcggattacattatccttttgccacataaaggcctgataatagtttgtagattgtgattagagcaggataaatattacttttcgtgtgtacgactttaggtccgataagcttattacaatgttatctttgggggcgggttaccacttaccagtgaccaaaaactttgtgggagatcaatcatattattgttttgttcataatgtatatccttcacatatgagaatgcttctttctttccccttctactacgttctgcaactttttgctctttatttttgacctgtttgtgaaaattgttgctgcagaaatgggcacaacctgaccttctgaaagctgctgttatttcaaccatgtcaatacttgctgtgcctcttgaggcatcggcatcggcggagacatgtcagccagctaattctatggccaatatgcccatttttattgctgtggctctaataggtgctgctgttggtggtaagatatgcaaacctgtgtacttgcaagctcaactggatttatataattttgatgaagcgaaccacattttattttgctttccctatgtgatttgcaggattactagcacggcaaagaaaggaggaattaaagcgactgaacactcaacttcgccaaattaacacggcacttagaagacaggcgcagattgagtcatttgctcctggccttacttacgcgccagttggcagagcaacagaaactgaagttattgtagatcccaggaagcaacaactgacagtaaatttgagaaacgggaagacatttatgaggaatcaagatcttgatatggcagtaaaggaattcagggcagctctggagctcgcaaagagcgtaggagatcgctttgaggagaagaaagctgctcgtggattaggttcgtttctttctaataataaccatcatatagttatttcttcactgtcataatagaaagtacataatgtgatgttttaccgtactgttcgaaaaattagctacaaacaagaaagacaggtaggctctgggtcttatagttaggctatataatcactaaaaagtgtttatcgaattgaattgtgttattggtgtcgtatcaaccattaagcaccaagcctttggtttatggtgctactttccacttctgtgaaactcaattatagcgaacacagttcaaaaggttcatcgagtttcaagcttaagaagcaatcactgtcagatagaaagcaattatattatttgagttttcaactgtgatttgagtttttccttttgttttgcattaggtgcatcgctacaaagattgggcaaatacagagaagcaatgaactgctactataaagtcctggagctttccaaggaaacgggcgaggattccgggtgcaccgaggcctacggcgccatagctgactgctacacggagcttggggatctagagcgagcggcgaagttgtatgacaagtacatatcaaggttgcagcccggcggtggtgagtaaacgcttgggctttcctgacccaaacgatttggtttcttcctgttgcatggttgatgttcagcaaaacagtcaatttgttggcctcattttagctttgtgggagcgcttgaatcgctcaaggaaaaaaagctcaactcttgtatataaatgtcagtggtgcgtgctacttgagataacaatggcaaagcttggtctggtttgctgcctgttgcaagcggcaagcactgcgtacacacacggtgcacgcatctactgatcttcctaaaataactctgccaaagttcaaatatcttaaaaatatatatatctaccgatctgctacactatatagttactttgcagtcctgaagagacgaatagaagatcatcttcatcgtcgatcgtcatatcctgacacatgatacggcagaaagtcttggcatagctgactggtcgatcaacgttatctccagccatctttaatggaccgatcaaggccatcctgtgctgtcctgctgtcctcttgatgttttccgcatctcctctccctcgtaaaatttcatatacatcgtcccaggggcatctgacaagcaatggctagtattatacgcggattttcaaaaaatttatataatcttatcctaacaccaaatatttatgaccaacgccaaatacttatgaccaaaaggaaggaaaccaatataccagcagtctttcgtgaaggtggaaaaaccctcaggaaaatacatttccctgttaggagttactattttcttttgacttactatccaggctcatcaaggtaattttgctaggaaagtaagtttgtctaccaacgcaaaaataattcttgatttcgtgtaagtgaccaaataggcgtgcgaacatgtggtgaaggcacatgtcactgatacgtgggatcatgttagaaattcatgtcccctttacatatgttagataagtctagttgcactggataatggtggggtgtgtaccacacaacacgcactacagtagtgcaatgtgctcaacctctttttgaactgcccaggggcggagctagaacaaaatggagggtgccacttacttaatttactttactttagatcgagtttaagctaatacgggtgcctaaattatattgagggtggtgcacacatagtgaaaataggtgaggtataactaaacagttttcttgaccgggttcctgggcaccccctaatatactctatctccgcccctggaactgccccatctagagggctcccatgaccaggatcgatgatttttgctctattaggagccatataaaatctaattgttgtactcgtgggtctactagtgagcagtaatccttatccattgggtaggtggtataaatctgttttttaattcgccacctgtaccagtaatccatgggtaaaaaaacccgtgtgcctagcatgatgtgtacttccttttgaacggtaatatatggtttagttctcgtatgatttgtttacctatcatatatggtctggttcttgcacgatttgtttacatggttttgaatgttaaccaaggttatatctatcatgatgtcttgcgttgtaatcgtctgattgttgtgcaaaattattagtgctatcagttagtttagtgggtatgaaaagaaatcttacacccgcgaacggatgtgggtgttggagcgagaatttttagtcatcacgaatgtgagtagaggatgagaaaacccgatgggtatgtacccattgctatctctgcccccatccaagtcgcccaacacgcaccgctgtaccagtttcacctggggcactacgaacaatcgaacatacgcggggtgaactgaatggatagacgatcgagtagatgacacgtacggctgcagaaatgcttacagctgtatcatctgcacgtacgcatcgcttggacgggataatgggttcagacttgagagagatcaggatgagagcaaccaaaaagtcgaaaaaattgcaagaggcagagttgtccatgcccctgttcttatgagtcacagcgattcagttcagagagtatgtagcagcatgtaagcatgatcctggtagtgcgtggtaggtgctgaattctctgaattctgaaccacttcgctgcttcaccgatggaactatttcttttgtccttcatacagagggtgtgtttagttgggaaaaataaaattttttggttttcacatcgaacgtttgaccggatatcagaaggggtattcagacacgaatgaaaaaaataatttcagaactcacctggaaaccgtgagacgaatcttttaagactaattaagctgtcattagcacatgtgggttactgtagcacttatgactaatcacgaactaattaggcttaaaagattcgtctcgcgatttcctccataactgtgcaattagtttttctttttatctatatttaatgtttcatgcatatgtctaaagattagatgtgatgtttttgggaaaaatttttggggaattgaacgggcccagaagttagtagatcttactatcttagatcattcgtctcatctgcccattgcgccgtaacgtacgtgtcgtcttctagctgcagccagtttcatgcttatcaccgcctatgactcagcttttcagcactataaatatgactctaacctcatacgtcacagatcagagcactagctagctagctagcttttgctcctacatcttcacttcagtaccacaccggcttagcaaaagccagctgcaagctagtaggatcgatcgaccaccatggcgtcgtcgtccaaggccctgctcttgctcgctgtcctcctcgcatccgccgtcctcctcgccgccgccgccgaccaacctcgtgagcgcacacacacatgcatatatatctttcttcacctccgatcgatcggtttattgcttaatttatgaatttgttgcagatggcaaggagcagaagaagacggagagcggcggcggcgcgggcgtccaggactggcacgacgaccacggtgggggcggccatcacggaggtggcggcggcggctaccccggtgggcagtgccatcacggatgctgcggcggctacggataccacggcggctgccgccgttgctgcgcgaccgccgacgagaagccggaccccatgtaccgccccgaggcgcacaactaattaagtctcagacgatcgtccgacgtacgtacgtacggccggcgccggagctcgctagcaacgtacgcagcaactaaaccaagtgaatactgaataatgaaaatgtgtatgccagcacgtatatatgtgtacatataaaagtctgtgcacgtatatgtatatatggaccacgtacgtacgtatgtatctgcgtgcatacggcggcggggtttgtgccgatatatgttactatacatgagtatatgtcaataaaaactagtactagtacttctaataccactagctactaaaaatgcatataaagatcgacgctatagggtaccaaaacagctaaaactaacacctatagtgcgtttctctccttcacgagttaagaacacataaaacaggcatctatacatgtgcaaggtttctggtgtagtaggactcgtactgtgcgcaagacgatgtgctggggagaaacagatcgattgtggctacccctaccggcgaagtcgatcgaagtcgtcagtccatcttccggaggatggggctgggatattggctgaaatcagggcctttctacggcgatgtacgaggagatgttgggcctgggatcgatcaatattactgcagaacagcagatcggcaacgctggacgtactgcgctcgagagatgggggaccggaaaacttcgaggtgcaacacgcgcagctagccgcacatggccagcaaaacagaatctagaaaacatacatgagaaattttacggttcatagaaaagtatcattagataaattttacaatagaaaatgtgatatcctccgataccttatcaagaatgataaaattacctaacatatatgcacatgtcgtttataaggggtgtttggtacttctgccacatactatcttgccaccacagtgtcttgtactgctctacataggcatagaaatactccctccgttcctaaaggaatagttttagctagtcaaaaatatattaagcgagagagtaaaatagcactacatccttctataatatggagagaaaacgaggaggctggaaaagaggcggaattgctattggttcaacggcgaaaaataaggaaaaaaatgaagtagtattaaagatatctctaaaactatattttttatggataagtttcttgactaaaactacactctttcagagatggcatgataagtttggaaacacgataaaggtttcaacaaacaacatctagctcgattattttttttggaggaactggtcaatcaagatggtcggaaaaattatagaagaatctttgaccatcggttgtgacatggcataagattttccttttgtagttttcggttgtatttttgctcgttctacgctatggaccgcaaaagagatggtttgggccttcatttggtccatgtgtcctacgttacatctgtctttccgcactaacaaaccagccccacaactatagttctactcttccccggccagaccaacgacccggttagcctttttcaatgcaagtaacatgaccgtacattataacgacactcatataattagagataatctaagaaagtgattaaaaataaaacattggatctggtgattacatgcgcggaggtacggatgtgttgcgaacgatgggagaaggtgatggaaggagaaagtatacgcttttacatcaatagagatatgcttaatgcctagaaccactttagtacaagttctacttagcttttggctttaagaaaatgctcctaagcaggggcggatctacccattaggtaggatgggtcgaccgactcagctacgactcgtgtcgccccacaccctaaagacctccttacccccttacagtagtcacaggtcatcaaaattaggtataacaaggtgtgaacacccaacatattgaggtagttatggaaatgttatgttcgattgctcttattgagtgaacatctccgttctccgcccatctatattttaaagttgcgtccgccactactcccaagtatatcaaatgggctaggttttttcacacaaatgtgaacgaccaaagaatagaccaagggtgaaatgggtacgtgattccacttactagtattgaagttatgcaaaggccgactagcctcactgtatatgattcgtgcctactttatccttggttgtccctccctctcccaccgctttcaagcccaaaaatataatcttgtaaagtttgctgaagtttaggtgtcatcagtgttgaggctcactaaggacgtcattgccattgtcagtgagtctcctcgccatctccccttctcaacctgcctcgcctgatcaaaaggttcatagtttgagtcacatgaagcctaacaatcccctattttctgtttctaagttaacgtcctcaggttagctagcctgagtactaattacttcgtttgttctcttgaggttaatctttgaagatatctcgatagaacattatttttcaataatatgttaaaataaaacttaataaaaataggaccacatgagtatctttttcgacaatatatcaatatcagtttcatatatgacatataaagcttaattattactccctccgttttaaaatgtttgacaccgttaactttttagtacgtgtttgagcattcgtcttatttaaacaatttaagtaattatttattcttttcatatcatttgattcattgttaaatatactttcatgtacgcatatagttttacatatttcataaaaaaatttttaataagacgagcggtcaaacatgtgctaaaaagtcaacggtgtcaaccattttgaaatggagtaatagtttggtgtaaaactttttgagttccggattcacgttgtctaaagacaacatacatatccatttgaaaatcaagggagcacgcagccgtagccctcatcatggcatcgatcagaagaagatatgttatccaaatggttctcgatcgatctcgttctgtggttcagaatcgaagctgtgatcaatgcgtgcaatatattcagagttttcagaccgatcgatcgaccatgctgcacgccctcgccgagtcaaacttggcttgtttccaccacagcccaactcatcaaatctccagtcgcccacagagatcaagctcgatcggtcgatccatccaacaggctactgctaccactgtttgcatatatatgcgttgcaggtttcaatggctaaatgccaagcatccatctccccaaccgctaacgttccatgactccctgtctgtgcacgggccctacaccgttgcaacacgcgtcaaacttgctcgatctcttgctcatctgcgtgcacctcgcgatctcataggactatgagcaagcgtcgtcgcctataaatacgcttggtatgcatgcattgcctctcatcaaacactgcacttcgcagtggtattagcagctactacaaagaacaagacagtaagatcttactacttagcgaggagaagagatcgatcgatcgatcgtaggagcaatggcgtcgaccaggcaggctctcatcgcgttcgccgtcgtcctcctcgccgccgctttcctcgtcgccgcctccgccgccgacgaaacccgtgagttctcgtcgtttcttcccaagttaattattagttctagcttagctctcaacacgcaattattagtatctcatatgtgttcttggcttaattaactacaacgtcgtcggtgatcgatatgatatgcagaggctaacaagaaggaggacaccaaggtggacgtgcaggactactggcgcggcggcggcgggtacccaccacggggcggcggctatggctatccggggcgcggctacggctatccggggcgcggcggcggcggtggctacccgggcggaggaggaggctggcacggctgccgctgctgcggctacggctaccgcggcggatgccgctgctgcgcgagccccgacgagatcccggagcccatgtaccgcccggaggtggatccccacaactgatccaatcgatcgatcgatcgatcctcggcacatgtttaattttagtttggtttcgtcaataaaatcaaaggcggcgcgtatgatctctatacgtgtacgtgtgtgtggccgccatacttatatatgtacgtatgcacagtgatcttggagaagtggagaacacataatgcttattttccactgtttttaattagggtatggtcgatcgatcagtactgtgtgtgtgaccgatgtatgtatcactttgtattattatgcatgtgatggaataaatctacctctatatagttatagtggtattgttaaagacttctattgctttgatttttttttttgcttacctattaatcagttattacttcatatttctctgtccaccgatcggtttatgaacggttgagatctcatcaaggttagcgcaaatgaggtaactcgatctagtgtgtcgcacctccatcaatgctagctcctccatctcgctagcattgcgtggcagtgagatgagacttatcggccgtgcaatctctgctgcttccctccctccattccttctccttctccgcacgctgctatcatcctattgaacaactgcagcaagattttcttaccctgcctctcatccactgtgttcggtggcttgcaccgtcacctccttgacgtcctttgcccccaccaccatccacttcgactactactattggctttccaccaccccgattatccctctaaagcgccctcaccttcccctcgcccccttccccctcctcactccaactttaaaaaccctcatccaaaggaagcatattggagtttattaggtgtggccgacactaaggctcacggagaaagttgacgttaccagcgttggtgagaccgtcatctccctccctctcctcttttcctccttctctggttgtagaagttgaagatgatgcattggccactgtagaaacaaaagaggaagacaccgctgactttttagtacgtgcttgaccattcgtcttcttcaaaaaaatttaagtaattatttattcttttcatatcatttggttcattgttaaatatactttcatggacacatatagttttacatatttcacaattcaaaaacttttgtgaaatatgtaaaactatacgtatgcataaaagtatatttaacaatgaatcaaataataggaaaataattaataattatttaaattttttgtataagatgagagcggtcaaacttgtgttaaaaagttaatggtgtcaaataaaacgaaacggagggagtactaatcaagtgtggcatggaccgatcgaccgatgatcgacgcatcctctcgatcggaggaaaccaagggaacaaaaccgttcgtcggatagatgtaatgcggcctatatatgcggtttgatccgatcctacgcttgcacttcacaacccgtacgtcgcccgccggttgatccatcagacggtacagcatcacggatgcatgtgatgtgcaaagcagcagcagcgagcacgcgacatgtacagcgacagatcgatcagcgcacacagatcgaagttgaaatgcttcaacgtcggatgcaccatcgacgccgccaacgaaaagctgctcctttcgtttcgtttcaggttactacttaatttcgttaaaatcaaactgcttaactaagtttatagataaatataagtaatatttatattattaaattagttttgttagattaataattaaatatgtttttataataaatttatcttatgtcaaaaatattattatttttttataaacttaattaaactttaagcagtttggctttgaccaaattcaaaacatcttataacgtaaaacggagggagtacttcgcatgcttaccttctcatcacacagcagatcatatacaccgatcaatcgatcagtgcctagctagtatagcttcttgctagtgaggaggagaagatcgatcgagaggtccagatctcattaattgttgtgttcgcgcgctctgatcgatgtcgttgatgcggcaggcgatggcccaagtggtttttgggccggcccagacgtacgtacgtgacccagtccaggcctggacaaatgttgtaggcctgataactcttcacagttcgctcgctctggcaaacgactttaggcccaaaacaacccgagtacgttgttggctgtttgtgctgctctggtctacccggctgtaataacttgcacatggccatcccataaacgcaacttgctgtagcctgtatctcggttagaagcaaactagtaacaagtcaatcagaacatgctggcaaaggaccaaactcaagcatatgtgtcgtagctggggcctaaaagatttgctcattcagtaacggtcgtttaatttgcgcctcccccaaaaggaaattaaagatgatatgtagaggactagaggtggagcgggattcgggtcgttccacaactccattgcagacaatgctcctagaattagatagggtaaaaacactacaaacaagtcatatgtgattaaccaggtcatctaccagagaaacaaatacttaattagatgaggtcagacccctttgccaccctgtctatatctgtggtttaatttctaaaagtatgctgggtcaagttttagagcgttgacaatgcactttatttgtgctatggtttcaatcaaacatttagagcttacattgccttatgttaaactttggaggagcacactttcaactacattaaattatactattttaatcttttacatatatttaaaatcataaaacttttggtatttagataattcaaatactttctttatttagccaagatttcttaaaaccttttctcaactaatataaaagggggtcgtcttcgtcctgatcctctcctaccatcgtacctcatcaagtaaaatataaaaactgaagatgtttttgctggttgtaatgcttcacttttcgtgagtcgttaaaaactaattgggcaaaatcctatatgtgaaaatttcgttctttgtgtgagagtctaagttgtgccaagatctcaattcaaatctccattgttgttccctctcgtcgccatcaaaatcctccaccttgagatttcctccttccaattcaagtctctgaaatctaattccgaaaattcaatccctctcttttgaatcctcgccaaataattgtccccgtcctaaaaatatcaaactccccttttgaatcccttcgtcgactcctccctctcatccaaatcccaattccgaaagtcaatctctcccttgaactcgttgccaaatctttctctcgatttcgagagaatcaatcatcatccgaatcatttccttgactcctccctgtttccctgagtccaagtaatcaaattcgaaattcaaattccaaatctcaaaaccttgccaaatattcgcccgtctccaaagatatccaaattccatttccaagctccaattccctccaattcaatttctctgtcaaagtctatttcgcctcccttgtcgatgggctgttcctctttcccggcccatcccctcctctcggcccagctctctcctgcgcgtgcgccgcacgtgctcggagcgagagagagagtgccgtcttctctttcccctctctctcgctcgttctccctcctctctcacactggcgccgatttccggccgccgccatccgaacctctaccgccttcgtcactccggcgccaaatcccccgcccgtcgccattcaattttcggccacgccagccgctccgcgcgcgcgcgccatgccgcctggtcgccgccacgtcagccctgacgccgcccatgccctgttgccgcgtcgcccccacccctgtgcgctcacgtccaaatcctagaggcaaagcctctctctccctccctctttctcccaagatggcaagggcaagccctcctttctctcttccttttcacctttacctcaacctcagcgactatcatgctctgccgccgcatggccgctagctccgagcacggctgccagctctcgctccttgaccgagccagcccgcgctcacgactcgaaaattcggccgtccgatccaccgccttcgccgcccaacacatccacaccgtcgccatgtttcgtgccgcccacgaaaacgccgatcccgctcgcggccgccagccaagcaccagctcgccccctcctcccaaaccgacatcgcctccactataaaacccaagccgccccaaaccccttcctctctcattttcgctcgcctcacacccaccacgccattgccgccgaaccaccgtcgccgccttgttgccactcgtctcgctctcgtcgtcgccgtccgtcgtcgagcaccggaggagtcggtgcgagcgtgaacgcgcgacaaggagctccgggcgccacctctccctccctccttccctggccacgccctctcggtgccgtgccaccccgccgccgcgaaagcctcctcgctgcctccttcttctcctcggtcgcgctccgccgccggcttcctgtttcctcgccaccgacgccgtccgtcgccatcggtgagctttccgcctaattcctctcgttgtcgtcctccttgatccccgtggaagacccccgagccgccgctcgccgcccttgcgccgcgcgctagctcgccggccgccatgctctgtcctagaggccgcctctcgtcgccagccactctcggtgccgctccgcccaaaccgacgccggaaacggattccttgaaccccggagatgctcacacccctttgaattgaaccctcgtcgtctcgtcgtgttttccccttttgcacgctggtgattgccgccgccgcaatacaccgccgtcgactcctctcgtgccgattcctctcgccgccacgctcccggggatccccttgatctccccctggctgtccctaggccgccggcctcccctctcgctcttgcgtcacgtcgcccgtttcgccgctgccgcgcttggccgtgccccacgaccggccacctccgctgtgcctccccagccgtcggcctccctccactccttgattcccggcgccgccaccatccccgagccctctcgaacttccccggcacaccgccgccgtcgcccgcctcgccagtcgcgcccgtgccatgccacctatcccaccgccgcacggccgccgtcgtgtctcctctcccacatccgagccggtggatggaacctccttgaccccctctcacttccggtgcctggtgcccactccggttcatcgccgttcgccggattccgctgcgcgccgtcggccgtccgatgcgccgcccggcctcctctccctccccatccgacgtggcagccacgtcggcttgaccaagtcaagttgaccggtcgcgcctgccccgtcagcgcccagtcagccacccccccttctctctcctttggcttgtgggcttggcccatcggcccaccttcccctcggccccttaaagtgaataaagtctacaattactcccttcttcaaaccagccatataaccaaagttcatctctccttccttacccctttgatggccccatttttcagtgactatcaaagaatattcttgagaatattctttttcataaaatttaataaatcttttcttcaatccagaaattccataaatcctttttcccttttccataaatcaattccttactcccaaaattccataaatcatttcctttggtcccgcacgtcagtgacggtcaataatattcttgagaatattatttctataaatttcataaatcaatttccccttgttccacaaatatcttccttcgcctagaaattccaattaaacttccaaaattcatatctcacaatccgcaactccgatggactccgttcaacttccagtaactccgtaaaattgagatctatttaatggcactattaattaggataaataggatccttcttttggtcttttgtttaggttttgattgtttgcgtatagttgcggttactggattttcgccaatcgcgggttttctcgaagattcgtgaagcttcatgaagaccttgagcaaggcaagccacctttgatcatcttgcacctataatttaaatctaagtatttcttttccgcaaatattgcatgaataggattaacacgagtaattcggccacggcttgcgagatagcctatcggcccccaaatcctaattactgcaattaccctccttgaattattgaacacttaaacctcctttgtcaaatgttgtgcttcgatgcatgggcccttaggcatgcgcatcggaacacctcccctcaaatttaaaatatccaacgatgggtaaaacttggggttttacaaaagatttggaaaaaaacctgacacctgggtcggtgcttgcgaactaaaatgaatttccaaaatcgcggaccggggacgtaccgggagtacggtttcccgctcttgcacttaaggaccgtttccttggaatttcatccgaacataaggcaagtgcgaccatatgggtagaatgggacgcccctggctgagtgattagctaatcgggggagccatgatgccaagagacatgtggattcaacggggtggtgccggggagaacccccgggcttcctggcacagtacggtctgggacctaacctgatgtcggtctgggacccctcttgttggcatatggtgaacctgtgccggctttcgaaatgcttgtcatgaaagcctaaaggtctccagacgtggccgttctacacgggctgggtgatccaggttagtaatgtcatgtgggtaaaatgtaccccctctgcagaggttattaaactgttcgaatagccgtgcccacggtcatgggcggatgtgaggtgattcctagcgtagttttgtttgactactgctttgtgaaactgctgtcgtggaaagggttcgatgtttggaaaatctgcggctgatgtgatcaactaggcccaggtagccgtttgaaagctgttggccgggtttcaaccttgatctattcaaagactgatacattgcacatactccgactggacgagactcactgtctcatccgtgtcgtttgagaagcactcacttagttgtttcaaaaaggagtttaaataaaatcaattgtaaaaacaacagcctttcctttgaagcctgcaataaacacttaattcccgtgacttgctgagtacgaaagtactcacccttgctctatataaatatatatatagttcctccgccttgaagctgacgacgaagtgaagtgaagaatagggtttcgtcctggttcctagccgtcgcctatggtgttgggtgttagaccgttggttccgctgctgctgctgttgttgttggtgtttcctcgtccgcgtcatcgattgcattctcgggctgttctgagctgcaacctaagttaaggtaaataagtcctctatttaatttaaggattgcaatgattcatatttgtcaccgtgggtaccagcgttatgtcctgggactggtactgtgatcgcggtttcgtaggaagcgattcgcgccgtttttcctacgacacactcctatcaggtgccgttgtacggcggtgccagattggggtgtgacaccggtacttttggtatgtcatccgtattttagtcggtttttaagttcactcgttttctgtgtttgagttgatttttaagttcgtttgctattagaagtatagaaggagacgtataagaaatcttttttaaaaaactcgcatgcaaacttgaaataatcggactcttaattgcagctcatgattttgtaaaaaaaaaaaatccaagcgaattcccatagtgaagtgaaaaggaaaaaaaaaaccatcccaaataaactatgttttcacgagaaaatcactaaaagaataaatagattgataaaactaaactctataaaaccgttcacccgtatttctaccaataccattgtaaaacgtattgggcgcgtcagtgtttgtattgtatttctaaaaatagcccattgtaaaacacggatataacactggttaagaaaaaagaaagacgagacgattgaacctctcacccacatctcttagtttgactgcttgcagttaaagttaatcccccacctttgaaaacgtactgggcatgcatatccagcatagcttagccagtatatatggtacaattttgctctagcttaccagctgcatattcgtttttttttcccaaacgcgctagcgacataagtttatttaactcaattttcattgtgtaaaattaaacatgacaaaattatattattttagtgaaatttatttttaacttataatcaattaaaagaaaatcatagtttggcatgtacgaccaatatatgaaagggtagatttggtatttgttaaaaatctgaaaaggttgtttagtcatttaaattagagaattgtttacttaatctattaaaagaaaataatagtttggcatgcaccccttatattcccatcatcccatgatatgacatggcatcgcccttatagatatcaatatatcatgcatttgtcattggttggcatgtttgccatctgttctgcttgctttatttgtggccttaatcaaggtgacttaatttactagctgcaagtagccagtccacgctttacaaatgtgtttctgtggtactagagctggcctgacggtcaaaaacttactccatccaacaacttactgccatggaattaactgttgatgacacggtactacggtagagctcatgaacacgtccaaaacaacatgcaaatggcaacacggtgtccttcgatttgtagaatatatataggtcaaccacagctctctgcatcatatgatgcacacacacagccatatatatttctgtcttagatatctaatgagagagctcagtaggtttaaatttgttactttaatttgtacatcatcatgcgggtccgtatatagtacggactacggagtagtgtctagtttagctgagctaactgaagctgcaggcgaccgagtaaattaaacctgcatatatatgaacgctcacaagtcaactgaatgccatgtactccccaccaatcgacatggcgtcagcaggagaaaaccggcggcagtcgtgccatcagttctgaccgcatacgcatatatatatagcctctcatcagcattcttgcatgtacattcagtaaggagatcgatctcgagaagccatgtcgtccaagggtttggttgtgttcgctctcctcctgctcgctgctgctttcctcgccacctcaggtgaagatatctttttaattcccccctaattatatacaagacgtgttaattattcataaataacaaatcatcttatatatatatgtacgttcagtgtacgtttcgtgtgcatatctaaacatatgcgcttttttcaaattgaaagttcacttacctcgaagaatccgcaattttcttgacggccaactgatttatttgatggtaaaaaaacagccgttaagttaaaacatattcttattagcggttctaacttgctgctagacatatactacctccatatttcaatgtatgacgtcgttgactttttgtccaatgtttgaccattcgtcttattaaaaaaattatgtaattatcatttagtttattatgacttgattcgtcatcaaatgttctttaagcatgacataaatattttcatatttgcataaaagttttgaataaaacgaatggtcaaacgttagttgaaaagtcaacggcgttgtacattaggatacggagggagtacgatatttatgcatccacgcatgcatgcagaggcggccaactcgcagccgacctaccctccggccaacggtggcagcgacggccaagcgggcggatcatcagcggctggtggcaacggcaaatcggccggctatgttgcgccctactacccaggcccgtggtggtggccaaacggcggcggcttctacccgccgcctccgtttaatggcggccctggctggtacgacccgcagttcggcggctgcccatttgggtgctgtggctacggggctttcaacgagtgcttgcagtgctgtgcgcgtccgtggttccccttctggtggtggccataaggggcacagcacatgcatgtactacgcacggcatgaaaccagagcacggtgcatgcatgctaccacccgctgttgaactacatgttcgtgatggatggaaagtgtgtgtttatttaattaagagtggggagtgtcaatgtacgtgttgtttgatcgatgtattgtgcatgttgtatgtgtaactctttattatggaataaaaagggggtggtggggggtgtgcttaattagtactacctctgttttttaatatatgacatcactcactttttatcaatatttgagcattcatcttattcatttttttttcaaatatagaaatatttaagtcatgcttaatgaatattttataataaatcaagttacaataaataaatgataattagaataaaatgaatggcggctaaacatatctaaaaagtgaatgacgtcatatattaaaaaactgagtaaacggatgaactagtagtatgatctaccaatgacacaatctacctagtaatggtgaacatggagtagtgacatagtggagccatggagcgggagaaacgaggattgtacaacattatctaaatgtgatgaaccaccatcgctcgtctctatattgtaaaatcaaagtgtgtttgattcttattctgtgaggaacaattcgcatctgagattattggttttggtatttggagattattagtgaaatggtttttggagatgattggatttacaggtaatgaacagggactgctgttttgtcgggttcggtcagaccggcggtatgtgtgtggtctgaccggccgactctgtgtcggttttggtttcgggttgtttctatggatatctgtggataatttgtgtttatgacttctaaatggatatactatgcatatgtaatattgttgtttgctaacaatgagtcaagttggagatagcttagtctcggaatatggtttcttggttgattcatgtgtaggtaatcttgacgcctcgggagagtgttgccggtgatggatcgggagtcaacttgaagataaggtgacgtacggacggtcagatatcatgcgggatatacttaggctaaagatgaatgcatgtggttggtgaagattctatatggcatttggatggagtatgggatgtagagtcgtatttggatggagtccaaatttggtacaattggagtttgtaaagttggtttcttgtacgggaaggtttctgtaacgctccgcttttcgtgagtcgttaaaaactaactcggcaaaatcctaattgcgaaaattttcgttctttgtgtgagagtctaagttgtgccaaggatccaaatttaatcccgttgttccctctcatcgaaatcaaaatcctccccctcatccaaattcctcttccgattcgagtctctgaaatcaaaattctgaaattcaaatccttcctttgaatcctcgccaaatacttctacgaatccagaattattcaaatcccgcctcgaatcctttccttgactccaccctatgttcccgagaacaaatacccaagtattccttttgaatcttttccatgactcctccttgagtttcccttgatacatccctaaaccctcgagttcgaatatcaaattgaattcgaatccaaaccctaaatctctccaattctatccaaatcagttttctctgtaaaagtctactttacctccctatttttttggatggaccgattttcctcccccggcccatctcccctccccagcccatttctctcctttgccatctccctcacgtgcgctgcacgagccgtcgccgagagaaggatctctctctctctctctcgttttctcgcgccgacaccgcttcccgccgtcgccgcccaaaacctccaccgccttcgcccattcccgcgtgcgcctcgcgaggtggccaaccggccggtcgccgctgacgccatgcgctgccgccttgcccccgctccatgccaaaccgaccgccgccgtcatcgtcgacgtcatccatggccccccccgccactccacgccgcacccgtccaagagtgggagaagcagctgccctccctctcctcctcctcctcactctccctctcctcattatggcaagggaccaagcccctttttccccttctttttccctttcccgaccactgcaggtgtcactgcctctgcgccgcttgaccgaccgcgccaactcgctctccttgaccgcgccagcccgcgctcccgcggttcgatttccgccgctcgatccaccgccttcgccgcccaacgcatccacgccgtcgccgctttcgcactgcccacgataccgccgctgccgcccgtgaacaccagccgagctcccttgaccgccaatgtcggtttccctcctccaaaccgacctctcctcctcgcctataaagcccgcgccctcccctctcgtttcgtctccgcctcgctcgaaacacccgcgcctttgttgccggccgccagctgctcgcccccgccccgccgtcgcgaccacctcgccacgactccctccgcgtcgccaacgttgctcctctctcgccggtgagctcctcgcccaaattcttgccatttgcatcatcttggataagccccgagccgttcggttgctcgctcgtccccctaaacgtgccgccccgccgttgctctgcttcgccgccgccgcgcccgactgtgcgccgccatgggccccctcgccaatccctcgcgccaccaccgtccttgagctccctaggacctccccaaaccattccctagcgtcgtcgccgcccggcacggcctcgccgccattgccgcccgctcccgaagaccgcctctcgtcgcgagccaatctgggtgccgctccgtccaatccgacgccggaaacggattccttgaaccccggagatgctcccacccctttgaatcgaaccctcgtcgtctcgtcgtgttttccccttttgctctccggtgattgccgccgccgcaatccaccgtcgtcggctcctctcgcgtcgattcctctcgccgccacgctcccggggatccccatgacctccccctggctgccccaaggccgtcggccttctcctttgtctccgcgccgtgtcgccgcttccgccgccgcctaacgccgccgcgcgtgcgtcgccggtgaccatcgggtcccgcgtccccgcgtgcgcatcgcggtcgcgtaccgtttcggctaggcccgagtccgcgcccccttgtcccttccctcgcgcgaccacatccccgatccgacgagcttggtcgccgtcgccagccaccgtcgtacctcccctctcaaatccgtgccgttaaacggattccccttgacctcctctagctgccggcggtagccgctcgctccggttcgccgccgctcgccggaacgcctcgcgcgtcgtcggccgtccgatcccgggcgcctcctcctcctcctcctcccctttcgcccctgcccgcgtggccgaccacgtggcagccacctcagccccgggcccgcttgactgggtcaagtcgcgcccagtcagcctcctccctccgtcttccctcccgtgcgcgcggtccgcggcaagccgtgcggctgcacatgggcccgccgccatccgtccacccggcgcgccgcgcccgaaccgcgcgcacctgaaaccctagcgcccgcccccgcgtgcgccctccccaccgtgaacccaaccaccgccatgtgggtcccgcgcggtggaccgcgcccaccccgtcgggcctccctctctccccgcgcgccctaatgggccgcctccccatggctgcgctcggcccaatggccggccaagccttgtgaatccctcgggccgcgcctaagtcgcccgaggaagtctaaatccgatccctccttccttttcttttccaagggaattaataattccttttccttgtccagaaaatccatttagacctccaaaattcatatccctcgatccgtagctccgatcgcctccgttccacttccagtaattccgtaaaattgagacctatttaatggcactactaataggtctaaataggatctttcttttggtcttttgtttaggtttttgattgtttgcgtatagttgcggttatcggattttcgtcgatcgcgggttttctcgaagattcgtgaagcttcgtgaagaccttgagcaaggcaagtcaccctttgatcaattgctcctataattgaaaagtcattattattttgtttgcaacttgcattattagaatcacacacttaacttgcttggcctcggtttgcgtgccaaaccgacggacctacccagtagtcgcactaatttccgtaggtcgtactaccctgattccttgtcgctccacccttgtggtacctcggtattcgtgctctctgagcgcgtataccaaatatcccacatacaccgttgtttgtcgaaaacttgggaaatgggtttgtgaagccttcaaaacccgacatgtggtgtcggtgtgtttgaaaataaaatgaattgtgaaaactcgcgatgcgggggttgtgcctatgtggcactgtcccgtattcgcatataaggaccgattcctgtgggaaactcatcgaacataatcaaagtgcaaccacaagttggaatgggacaccctggctaagtaactagtcggttcagggaaacctcgcatgccaatagttgggaacgccggggcggggtcggtcaaaccgggttcctggtaaggcaaggacgagaagcttgctcacttaccgatcaaggtggttggagttgatttgtgaatgcctaaaatggcctatacttacgtgaggatttgatccttctttgtggcatgaggtaaccctgggtcggcttgggaaaggctttttcgcgaacctctgacaccggccagtgtctggagtaagttcgtgtcttgtgggtaaagtgtacccctctgcagaggttaactaactgttcgaacagccgtgcccatggttatgggcgaatgtgaggtggttcccgttgcgtagatttgtttgcctgtgctttgtgaaaagttgttgtggtgtgggaatcgtaaccagaatcagcctatgtggcagatggacgacctgagtggtcagaaacgaatctgtgtgattcgggatgtctgtgggcatcatagactaggcttcccgagtggaagcggattgttgtgctgctgggtagctggactctgggagtccgagaaaatgaaaaaggctctgggagccgattaatcaagtggaatggctctgggagccgagaagtaatgatctgacccgggaggtcggtacattgccaaatgagctgttgaaaaacatctcttaaagtcgaatcgagacgcaagtctcttttcgccccaaacttagaaagaaataaatcacttagtgatttcaaaatgtcttcaaataaaagatttgcaaaacaaccttgcctctcttccaagcttgcattaaacacctaagttcccgtgacttgctgagtacgaaagtactcacccttgctctatataaatatatatatatagttcctccgccctgaagagaagataaagtgaagtgaagattagggtttcgtcctggttcccagccgtcgcctgtggtgttgggtattagaccgttggttccgctgctgctgttgttggtgttcgcctcgtccgtgtcgtcggttgtattctcgggctgtctgagctgcaacctaagttaaggtaaataaatcctctatttattttaaagattgctatgattcatatttgtcaccgtgggtaccagcactatgtcctgggactggtaccgagatcgcggtttcgtaggaagcagttcgcgccgttttccctacgacacgctcctgtcaggtgccgttgtacggcagtatcagattggggtgtgacagtttcctaggtggattaggacttcttatatgagtttggttcatggctttaggctgcctacatcatgcataaatagagagggaaggtgtggcctcccggtatctcttcagagagcgtgaagttgagagaatagttagggttttgagtttagtcgagattttcgtgagtgttattgttgcactttgtaaacacagagagaaataataaagttttcatctactttgagagtttttcgatttgtgtttgctcgggttcggcagtccaaccggcgggacaccgacggtcagaccgacgacatcgcaccgatcatatcgacaggtacacgacggtcagaccggcggtggcgataagaggcagagccgatttcgacatggttagaccgggcgatctactccagtcagaccagcggtacaagcacggtcagaccgacagatcaacttcggtcagaccgatcaacatcgatttaaggggtaacttttaaataatcagaacaaaatataaccttgctaaaagaaattgggggaggaaagcattgttgttttttgccataaaaatgagaccgtgtaacatcttttctttgattaccatatcacacagtgtgcttggcgatgtgtcttatttctttcaacacccctccctaaaataataaaaatatttttgtaactgcctaagagaagttcctagatctatttaaataactaattttgtttgaaattggtgccttatgttggtcaattggtgttgtcgcaatgatataatttttaacaataaagaattgtctaaccccagaaaggttattttcatgccttcagttcagttgactctattcttgaaccttgatgttatatatcttgatactatgcgtagtggagctatattcttcgaattggtagccaagggttttttttccactttggatgtcatagttcctatagaacatcgttatagaatatagattctatatgttttctatttggtgttttaattagttggatatcatgagaagctagggagatgggggtgtgtcccataactctaagtattttctggattcactggccatgtgcgtatttgcagagcgaggctagagatgttaatcatttttattattttttaaaaaaagtttggtcgcctaaaacaataatactataattttttttgtgaaatgatgttcttgggtaattggtcgcgtaaaacaataataccataatttttcgtgaaatgatgttcttcgttaatacggtgctttcattattttgttttccctttttattttcgtatagaataacataatgttgatctggtcaaccgtatataacagaatactgcctgcatgccgcctctcgcatgtattgtgttattttggattttacattggacgtaacttctgagctgaggcttaaggtgacctcactacccatgcactgtccacgcgctatacagaaaattgcgtcgttaagaagctttggcggtcaaaaacttgttccaacctaaagcattattcctactgaactcgatctcgttggccaaaccaacacgggagagatcatgatcatgtccgaaacaacatgcacgtatgacgagatgtatcatatcatttcgatcgatctggatatataatgtacatgtaatctgtacctttttccagagtgtgagctctttctttttggacaccatgcctgcctctttacacacacattaatttaccgctgtactatacaaaggatcggaccaggtagctgactgagtaattaatttgcatatgaaagctaagtagagtcagctctccatggctcatattgtcttcgagtactcccatcgatcgagacgacatcaacgccgcgcgcggcgaaaagctcatcgatcgatcgatcaaattggtagctagctgtcatgcatcaaccatatatatctcgtttcgttcagttcgtgtgcctataaatacgctcgctttgcatgaatcgcttctcatcaccacacttgcagcgtatagttacagtcgatcgaggtggtcagtgagacacagtgagaaaatacacgattgatcgaaggagcagcagctagctatttattttagctagccatggcgtccaaggctttgctcgtgttcgctctcgtcctcgctggtgcctttctcgtcaactgcgcccagcagcctcgtacgtgatcgatccaaaataatttagactaaagatctattccaattgatatgatctccctaacttatatagtatatgtgtatagataatcaatttcttctagctatacacattgattcgttttctgtcttatgttagttaacatatatttttcttttgcaaaatgaagactgacatatggtgcaattcccgtacgtacgtttgcagagccctacgccgaccccagcaacgacgaccccaacgccggctacggcagcagcggctacggctacccgtcgcagcagggacaaaacccagcgcagcagggacctaacccggcgcaacagggaccaaacccggcccagcagggacagaaccctgctcagcagggaccaaacccggcgcagcagggaccgtaccaggcgcagcagggacagaacggcggcgatggcggcggcggctatggcggcgccggcggcaatggtggcggcgccggcggcggtagcggaggcgccgccggcggcggcggcggcggctacggcgatccgtggtggaatcatcctcgccgctgccggtatggttgctgcgagtgcggctactaccgctgcaaccgctgctgctaattaagctactagctcatcatcgatcagccagctgagatcgaaataacggatcaagctacgtatgtactaccgcctgtcgcgtacgtactaccgtatatacgtgcgtgatatataccaataaatattattgaaggtttgttaaattaatttggtcgaatattagtaagtgtgtccctgtatggtacgtgtcgtaatgtattgtgagagtgtgtacctgtggaataataaaaagggcggtggcttgatacttttgtgcgcgaatttatatatcttgatgatctatatgcgtggttatgtattaagagggaaaattaactaagaagtaagaacgcacacggaatcagtaataatccatgcatatacggagaagattttataaggtgatgatcaactttataaagtggagtagttggtaaagtatgtgcatagtttacagtgtcaggctaattacgtacgcaatctcttagggtgtagctatatatatggcgccatatttttcatcaaaaaatagtcggcatgtatttacattgtaagtccctaaattacatatgtaattttagtgtatttacgatgtaagtctcaaaattatatatgtaagtactaaaattacatatgtaaattcgaaaattacataccaattacatatgtaagtggggtgtaaatgaggtataactattgtgtaagtggttgaaaaaaaatcgactgtagcatatggcgccatatttctagcaactccgatctcttatatcctttctttacgatgcatgcatgcaaaggaaacgaaggaaccaactttacaccaaaacttcatcctttgcagatagcccgtcgtttcctttcatttaattttcgcgagatgactagggtaaatctctgggtcgtttgttcaagttttagtaatcattttctgcaaattgacacacaccatgcgagcccaccggaaaatgatgtcaagttctggaggttttatcgcagcatatgaatggtggaaaatcgaccggtactcgaaaactcgaagctagcaaaacctgacccctgagcaaaaccggcccaatagctctctgaacggtcaaaagagtactagtaattctggcccaagtaaacatatactcagactagctctcggccatctcaatttagggtgtgttattggaaaggatatccctaaatgaaaaatagtaattcagtttttgagtgtgtttggttggtagacgaggatggataggacggcccggagagggatattccacaaagatgcttgctgagtgtatccggccggataaggatatccacctttactaatcttgatcattagttgttgactagcaataattaatgtattttgttattaattagtaattaacttgtcaaagtgttgattagatataaatagtgtattttattgttaattagtataaattatggatggattaatgataattaatatattttattattaattagtatgttattgttttcattcaatacatctcatccacccaaccaaataaactggatggccatatccacccaaccaaacaaaaaactgtaccaccatatccctgcaaatatgaatggccaaatcttgtccaaccttgaccacaaaccaaacacacctaataatatagttgtaatatattattgggtagaaaattaaaatgaatttgaacaggcttatccggtctcgatggttttcgattcttccctttcgccggtcacgatggttctagagtccatccaccaggagggtcgtttctggtctctcactggtgccgtctcgtttggggacctgttggaagagtaggaggctcctctgcctcctctcctgttagataggagcaacaacttttagttcttagttttttaactcttttttcttttcattttccttgcgttgtgtgaataaaactctatttcttttaatatactgacatgtaatctttttgcgtatccatgaaaaaaaaggctttatccaaatttgttgtattatatagtatctcattcgattatggttattatttggctggacacaagttttgctcgtcatatggtttttccctgttgtagagcggctctgctgaaggattgcccacattcgcacccttccctcccacaataatattcaggcattgagaagcggtaggtgcctgtatttgatcttttcgaatcaagcacatcacaaaaggagataatgggcacaaatatgtgaggtgcatcacgtcctcgcttttattcagattagtgtgtgtataaaagagtgtcgctgtacattctggaagtaatatcaaatttgcgaatatattctagtactcccctctagtaaaaaaaaaacgttttgactttgaaaccaccagtaatctagtactcctaatgtcaaatattattggcaggggggagtagaagctagttaagttatattttggaaatagacagctgtgtttgataggaaaggtttacctttctccaccgcatgaaaaatgtgttagctcattagcacataattaattaattaattagctaaaaaacttaaaaaaataatataactttttaaagcaatttgtatataaaaatttattaaaaaaacacatcatttaatttaatagtttagtaagcttgtgcatgaaaaatgagagagatgttgagaacttaagaacacaacctctttactatagggactacatactttagagacaacacatctgcattactgtgcactagggtttccatcaaaattttaccagcttggtttgtatataaccaaagtcataacaagacgataagccactaaaaaatttctcatgcatgattcgccaactaaccaaattctaatcaaatttctcatgcttgattccatccgtttcatattacaagacgtttctgatcaaactaagtttgttaagttttaaccaaaattataaaaaaacgtaataatattttttaaaaccaaacaggcataatgaagctaatttggtgttacaaaagttactactccctccatttcgttttatttgacaccgttgactttttagcacatgtttaaccgctcgtcttatttaaaaaatttaaataattatcaattcttttcctatcatttgattcattgttaaatatacttttatgcatacgtatagttttacatatttcacaaaagtttttgaataagacgagcggtcaaacatatgctaaaaagtcaacggtgtcaaataaaacgaaacggagggagtacatttttataaacttgattaaacttatttgacaaaaaaggtaaaagtgtattataatatataaaacgaagaaagtaaatcataagtcgtcacttggaaatcaacctgatttccaaatagttcagtacgtgcatgtacgaaagcgtgcttcatgggtaagccgtatgaggaacacgtcttaggttatgttcgcacgtcctttttcattttcactctctcattttctacgcgcacacatattttttaatctgtgaaatgatgaatttattttctttataaagttattttaaaaaatcatatcaatctattttaatttttttaagttactacttaattaattatgtgttaatgagctatattattttcgtgcgagaatgagttacgaagacgatcgccggtgctctagccacgcagggcttcaatctttttttttagggaagtcatttagcgcgctttattaatctgtaaacataattacatcgttcactagaacgttcagcaagaaaattagggcctcatcaacccaattacaataattcttaaacttaaaagcatgattagctagaacatgtgccacacaattagcttcctttttacaatgctcaacagagactttaacaaaatcatatatcaaaatctggtattcatagaaaattgccacagctgttgttgccgaaaaacctccatcttgtatcgtctccaccacctgcaaacaatctgattgggtaataatattttgacaaccaatttgctaggcgaggatgagtccatccctaagggcgtaggcttctgccattgctgcatcagcaatatgagataagtacctacaagaaccagctaaaaaagtcccttgtgaatctcgtatgactgctccggttccttctgtactcgagacgatgtcaaaggaagcacctatgtttaccttgagaattacttcaggaggtttatgcaatccttcccgtggttttgcatccgactttttctttgccatcttataatttagtgttagagcatacaatagatatagctgatctagcagccatctgaatcctttcaccattcaccacttgcctcctttcccaccaaatgtaccatcccctgttaaaatcaattcagcaaaaccctgatcattgagtagtggtggtaaggtttagggcttcaatctttaattatacaatgtttcgctttcgaagacgatcgacgacacacactatgttctgtaaacgcatatggaatttgaattccgatgtgtgttacttttcccttccaggaaacacacgatcacgcgcacgaaaaagtcgatttgactgtccgcatagtgtactttatttatttaattccatatacagtatttcttactaacttactccgatcatgtgaaaaacttaatctgttagttttttttttctcgtcaaatgttctttcgtattgtgatgtattcatatttttatataacataatgcgctctggtcaaccatataattaaactagcagttgtctgtcttaattgcatgtacgtgttatatataattcatttgggctcgatacgtagaagttcaatataatgctttatttgtgatgagagaatgagaacggccaaatgtcaaagcttaaaaagaattaatgcatttcttggagcttgatggtcaaaaacttaatccaaacgtactgaagccatgcattactccaatggaactaattgatgggtcaaaccaacacggtaaagatcgaccaatcgtggtaactttatggtatatccttcgatttgatgagtacatatattatatccatgtatcttatccagagagtgtgatgtcggtttgtttaggcacaccgtgcgcgtgtctctatatagtagtatgtttttctcccttttttgctagttgacgccgagagaatttgcacaagcgttaagtagtcaactcaaaatatgacacacacacacatacgccgcgcgcgccgccttcggctcccatcgatcgagagggcgtcaacgcgtgcgcgcggtgagaaagcacgatccgatagacgatccggtagttgccggccatggtgtcatcaacccggacacatccgttggcgatcagctgcgcgcgttcagttcttggctataaattgtacgctctgttttgcttaattgcaaagcttctcttcttcacgcgcttgcagtaaatcgatcttaatctcagctagctagctagctagccatggcgtcgtccagggctttacttgtgttcgctctgctgctcgccgctgccttcctcgtcaactgcgctcgacaagaacctcgtgagcttccgcaccaacttcatgcacaaattacctaattaaagatcgagtccacactccacacgcacacaaaaattaatctcccaagtcaacacccatgttaattactgttgatcttttccttgttcttgcatatatgtatatgcgtgtatatatacttttcggatgagaaacgtactcacgtatatatttgaatgtgcacttgcagagcccaacgagggaccggcagctgaccccaacgccggcggcggcggcggaggcggcggcgacggatcatcgggctacgacgacggcaaagtgtccaagtccggccaccggccgcaggcgaagtactataatggccaccggccgcaggggaagtatggtggccatcgtccgcaggggaaatactacgggtacagcgaatgcggtggcggcggtgacgacggcgactgcggcggtccatgcgagcatcgtcgctgtgagtacggctgctgcgagggcgggtacggcggcgaccgcggccaccggtgctgcgatcacggcgagttcggcggccgccactagctagcccgatcatatcatatcgcatgcgccgccgatcgatcgatgacgaccctattggctatagcagctattagtctattaattactgcccatcacatactgcagtagaggtttggtttagttataataaaaactgtcgttattcgcaagtgtgtatctgtatatacgtagtttggtactccatataattaagtaatgtattgtacgtgtcaagtgtgctatgtatgaaatatgaatagatcacacgtggaataaaagagcgatagagcggactggtgggagattaattctatataagtattaaacattgcatatacatgtacttttttttaactggaaaaaatacccgtacgttgcaacggttgaaggttatcttaatcttattgtttttatacggtttagctaaggtaaaattcactgtaggaatttgctttgatattgtttttacaagatcataagctacaattaggagcccgatcgtctcgagttagcatgccagttttttcaaagagatttcttatacaactccttctatatttccaaaatcaaacaaacttaaaacctactcaaatacaaatctctatttccaaatgcaaatgaactaaaaaaaccgactcaaatacggataacgtaccaaaataccggcaaaaacatcttcaatttttataatagtagagaagagatacggcccttttaggctgtattcttcccccatctttcccaactcaccactctctttttcgtaggcacgcttttcaaactgctaaacggtgtgttttataaaaaaaaatctatacaaaagttgttttaaaaatcatattaatctattttttaaaaaaatagttagtatttacttaatgacgcaataatacatgctttattttgagtgtcggggagccttagtcccttttgtgtccccgtgttcaaacaagttcctaaagttttctcacgtagttcaatatagtccttagaagaaaaacagtgagaccacgtgaacatgcctactgcccactgctacagaaccccctgtaggtgatggctcatatgaaccccctacgtgcctacatgcatatgtgtcggttcaattggaatttgaaccgacacctataatatattggtataagtgccttcaaattagtgctggctgtgaaactgacaccaatgcttgattcccaacctcatcctcgcatacaatgtcaacatttaaatatccattgtaccaatacaaaacatagaaataaagaaataaaaacaaagaataatgaaaaaagaggtttctattgcacagtgtcccattcaagatagtatggtaccaggtggttatcagatctagtactccatcaatgccaattgatatccactggtatcagatctattactccatcgtatataccagctaaaattcgtaggtgtcagatatgatacccatgggtaagtggtaactaatcgacggcggcacccatcgccacgatggtctagcacatggccgtaggggtggatattcagtctaaaaaaattggtattgtatttgaagaaattcagctatttgaatataatgaccgaattgcattggaaaaacgctaggaccgaatattgcagtctcaggtaatttggttttggtcttggttgattggaattttgtaagagctgagattcaaacaaattaccaacaaattcagtagatccaaaacaatcgcacatacatcacaaaaatccaataggaatagccaatgagcttgtcgagcttccagtcttccaccacatcggctttggataggggcattgatctccacctctagcatggagtacgagcaggcaaggccgtcagtgtggcgctagatcaggtagcgcaggatcccatcgcacatcaccttcgcacgctttaggctcctgtggtcacccatatgccccctttatttttacaaacaagctaaaagaagacccgtgtgtaaaaagatttagggggtgcctagtaaatacatgtatttgaaaatcaatttcacaaatggaacacttaacatgcctgtcgtgaaaataagtttatttttgcaggcgacctgataagaagtccgcatgtgaaaatagaatttccgcatctgtggattttggtccgcatgagaagaggatatatcctctccctctccttttctctccttcctcttagtgttaagtcctaaactgatcctctccctcgcagtcctctctcacccatcatgatcctctcccccaccacctctcctcccatcttcacccttcccctcttccacatcacccctccaacccatcaactctctcaaccagcaacaagtgacggagcgcctgggacaaagcactcgtgacgggagcagatggcacgcgccttggctcctcatcctccaaccccaacggccttgagatggccgaatccggcactggcggctttgcgacgatgtcctctccctcgactcttcctcctccactgcatgaggccccatgaaagcctctcccttggctcatcatcctccaccttgatggccagatccggcggaggtagccccgggaagagcgggtttgctgccggcgaccactagagcggtggatccgccggctttgggcggtggcggggtaccagtggatctggctagatcgaccagcgctaggtttttcgtaccttttttagaaactttttttaccaaaattattttgtaggtgagcatcttaacatgtccatatgtgaaaataagttcttttattccgttgtggtgcccacttgcgataatcggcatttctacaaaacgattttgctcgtttggagaaaaaaaaccttttttttaagtagtgctcgtcagctagtcggagtggaggaggtgcagcttaaagcggtgatgcggaataaccatcgaagacagtggtataaactatgttgatatctgatatttgctagaaatgtcaaagaattagtagcaaatataaacatgaaaaaatgggtctttttataattctacaaatttgaacatcttatatgcagaactgaaaacacactaaataatacttttaactgtatatgtttatagggattttacaaaacatatcaaactactagtaagtattaaagaaacccatgtttccgaataatctaaatagtgtacgcacgcttcacgcacaaaagaaaaatacacggccgggctaagtagttaagcgtgctaataggtgcgccgtttttttagtatagacatattcgacgcactcgcttttaacgttttctcacataacccagcgtggaatacgtcatgtacagtatgctatactgaaattaattacgttatacgctcaggacttgatccttaaggatccttaaggatcaagcttgacacatcacggtcgatttcctttggtgaaaaaggcacacgctttgttctgtaaaactcacactgaatttgaaattcgaagagagcgaactttcctttttgaaaaacgcatgaactgtactatacgtacgtacaaatgcacgaaaagtttgtggagctagtccaggagagctgagctgagctgagctgagctcggtttgcacatcatcatggattatctggagctgtacaggatcggatcaggttgcagccgaccgagtaattaattaaattaattgcagaagaacactaatcaagcagtcaactatatagcgtcaacatgcccaccgatcgagatagcgtcaacggaccgggagaaaatctcatatggtttcagttcagttcagttctgtgcatgcctataaatacgctagaatagcttcttaattatcatcacgcacttgccgtactgagaggaaagggtttacgatcgatcgattcgatcaagagatagctagcaatagcttagccatggcgtccaagggtttactcatcgtgtccgtgctcctgctggcatctgctttcctcgccacctcaggtgaagatcatcgtatgtcggtcgtgaacgcaccaactgcatatatgtgaaaattagaccaaagatcgatcaaatctatatacaatatatttattatatacacacaataaagatctcctgatcccatatacaatataataaagtagaaaacagagccacatatataactttattctctcactaatatttgtgtatggatggaaatgcagaggctgatgacccggagccagcgaacactagtccaggcggcggcggcggatcatcaggttacggccaagcaggcggatctaccggctacaacgccgtctcagcctactacccaccgccaacacctgcagggtggccaaacggtggcggctactcctacggatcagtaggacaggacggcagctactcctactcgtatggagtacagtacatcaatggcgatcctgcgggttggtctggatggaacaatgtgtggtggttcgaccgccggtgcccatcgggcgcttgttgtgcccgtgggttcaacggcgattgcttccgttgctgccatccgtggccgtagtacatctttgtgtgtgtgacttgtaataacgaataagtatataccactttaattagctttatatatatcaaccgcacgcccgtgataatactgaatgtggtcttattaaattaccagttggagtatttaccaaactaccgtgtgttatttgatgtacgagttagatgtatctttatggaataataataataataataacaataaaagggtggcggagtaatcctataaacttatacaatttatcgattatttaggacattatcagggtctcttgaattcctattgattttgcatgcatcgtagctgtgtgtgtgtgtgtgtgtgtgttaacaccaagaggaggccacggcccaggagcattgggatctttggcaactgccagctctcattgtgtcgatgatttcatcgaaccggatgcggtgccctctcttgattgatttatgcaccaccatattgccattaactttgttgctttgatattttatatatggttcatccagtaagtcgttcaggtaactcctttgtttgtcaattgatttggtttgtgatttttttttcaagagttaatatctatttataatcgaaatttggaatggtacgcatatgagctaaccgagttgtcgttcttactacaatattgcattgacaagtaaatagtctttgaatacacaacacacaaaacatttatgtacatatctatacatatattagaagtaatcatgtcacgccccgaactagtcccgaccggaactagcccgtgatgctccaatttaacctgttaatcgataccagtcccaggaaacagtgctagtatcacagggagacagaatatcacagcaacagaggtctctttattatagagtagatgtacagtcatgttgggctgcggacagatcccgagctcacaaccgcattacaaaaggaaagcggaagccaggacttggaccaatcaacacaggcgcgacttgggaactaggccgaaaccctaaaactcatcgtagccggcttgctcctggaagaactccttatcagcaggatccgcttcatcttcttcagcaactgggggggaattatttatatagagcaagggtgagtacgggagtactcagcaagccatgggaaataagtgtttaatgcaggcttcaaggaaaggctggtgtttttgcaattaattttatttgaactcttttctgaaacaactaagtgagtgcttctcaaacgacacggatgagacagtgcgtcccgtccggtcggagtatgtgcaatgtatcagtctttagaatttaaacaaggttggcacccggccaacagctttttcaacggccacccgggccaacaacttttcaaacggccacctgggccaacaacttttcaaacggccacccgggcctagctgatcccatcagctgcagatttttcaaacaccgaaccccttttcacacagcaatttcacaagcagtagtcaaaccaaactacgctaggaatcacctcacatccgcccatgaccgtgggcacggctgttcgaacagtttgttaacctctgcagagggggtacactttacccacacgacattactaacccggatcacccagcccgtggggatcagccacgtcgggagacctccaagctttcatgacaaggcatttccaaagccgacacaggtttaccatgtgccgacgagaggggtcccagaccaacaacaggttaggtcccagaccatactgtgccaagaagcccaggggtcctccccgacaccaccctggtgaatccacatgtctctcggcatcaaggctcccctgataagctagttactcagccaggggtgtcccattccacccatgtggtcgtacttgtcttatgtttggatgaaattccaaggaatcggtccttaagtgcgagagcgggaaaccgtacacccggtacgtttcccggtccgcggttttgaaaattcatttagttcgcaagcagcgacccaggtgtcgggttttccaagtcttttgtaaaactccagttttacccaagttgttactcagattttaagtttgaaggcgaccgtcgatactggcacagggtgcacgaatatcgaggcgcaactggatggttacaaggggacatggtatagcaattaacaatggaaggatcaaatgcaacaagttaggtaggtctgccaatctgccttgcagacggaacaacagattaagtgcaatcctatcaatgcataatattttgcaagcaatataattagatttcaaatataggctcaagatgttcaaaggtggcttgccttgctcgagatctggagcttgatcctcgaaatcctcgcactgcgggtcttcgggctccgaaactatacgcaaaacaggacaactcaacaaacggcgaaaataaagccctattaatgacctctaagcgtgccattagatagatctcgagatttgagaaattttggaatttgaacggagtcaaacggatttacggttgggaagatattgaatttctaagattattggatttttggtctaaaggaaaaggatttacttaaatcccttttttttggaaaagaaaaagaaaagaaaaggggagagggagggaatatagacttccctcgggcggctagggcgcggcccgagaaaaagggcggctcggccgagcttaacgggccggccggcccaagaaggcggcccagagcggcccaagacgcgcgcgcgcgggagggaggagagagagagccggtggaccgggctcaccatgcgcggtcccgggtgggacccgcttgtcagcggctcggctcaccgtgcggagggagtacgcggctcatgcgcgcgggcgggggagggacgcggtgcacgcgcgcggttcgcggtggacgcggatgcggcgggcccacgcgcagcctcacgactagcggtggaacgcgcgcacggggagggactgaccggggtcggctcgacccggtctaggctgagctggcgccgacgtggcgcctatgtggctgccacgcgggccggcgggaggtagacgatgacccggccgcgaatggacggcgggcggcggcggcgagcggcggagcgaaccacggcgatacggacaaaagcgagcacaccgggcggttgctcgtgatgaggggagacgagccaacggctcggatttgccagaggaagcttgacggcggcgaatcgcggcggcgacaaccggcggggagggaagagggaaacggcggcgaggccacgaggggtcgattcccggcggtgagagcatctacgcggtttcgggaactcgatgctagcgtcggattggacggagctacgccgagcgaggctggcgacgtgtgggtgctacggagctcgagcggcgacggcgagcgacggcaacggtcagggcggcgccggctaactacggggagtctactcgagctactaccgaaagctagggggaggagatggagcgaggaggaagaacggagggaggcatcaccgagatgaggaggggcgctgtgacgagaggccgacggcgcgggagtaatctctccggccttgggccggggaagaggaaggagagggcgcggccgaagtccccttccgcgtccttgctcgtgccgactccttcgacacgcgcaacaacgaacggcgacggcgaacagagcacggaggcggcagctatggcgaggaggcgaaaacgagggagattggaggggaaggagctggggtttaaagggggcggcaatgtcggtttgggaaccgacttagggcggtcaaggcacgagctggcgctcggcggtcgcggccaaagcggcgacagggaggatgacgccggcgggggaaaaggggaaagaggaggaggggagcgggggcgacgcggcagagggaggaggggcgctgcctccgtcccttggcggcttgcgcgcagagtggcgggggccgggcggtgacgacggcgatgacagcgggcggtttggagcggcgcgacgacacgggcgacagacgcgtgcagaggctgacggcggcggcgaccgggcggtcggccactcggcacgcgcgcgcggcttgcaacgggcggcgtccgcgcgggcgtgcgcacgcgaacacggcgcgcgggaagtggcagcgagggagcggagagggaggacttggctcggcgcgggcggcttacgcaggcgcggcagagcgaggagaggggaagggggcgctcggcgcggcggctcttcgcgcacgcgcgcgcggcgcgcgggcgaggcggagcggagctgagcggggaggagcggagcgcgccggggaggggagagggccgggggagagagagagagagagagagagagagcgcccgggagagggagcgcgccgggagggagagggccgggggagagggagagagagagagagagagcgcccgggagagggggagagggagcgcgccgggaggaaatcggcccatcgacccccaggggaggcaaaatagacttttgcggaggaatttgatttggaaggattggattcggaaatggactcgacgatagatcggggattgagatcttgagatggcacggacactagacaacaagcaaagaaacaaatttcgcaattagggtttttaagagataattttcccgctaggcgccacgacggaacgggcgctacaaatcatccaagaatccacgctccaaacatttgtctacatatctatacatatgttacaaataatcgtccataaatccacgctccactatgtatcccaatatttcaatgggatatctcaaaagtttatgattgttgcaatcaaagcatggtcaaaagaaatttcctcatattctccctcaaagcatgtgccttagcctgatcaataaatttggatgtttccttcataaatgtaggatgagttgttcgaaaatcttgtacatccataccaatccatatatacatagtcacggtacaaaaaaaattagaacgcaggtatttcttagaaaacatgagtatttcctcaaaattaatgcaacattacattaattgtagtatgtactagtgattacaatactccctccgtccgaaaatataagggtctcccaaaaacccttatcttttgggacggagagagtaacaattttctcatcgtaacattgtatttgagctagattttgaaaaaaaaaaggctcaaaaaagtcctcttatagaaatgcgaattgtttgcattgctccgacgaaatttgaaataaatggaggcaaatgaaaaaggtaagcaagtatgttacctttcataccaaaaccaagcaaatatttcaagttgaaccccccccccccctatttgttacttcgttttgtagagagaaacttcggattcaaatggctccagcttgggctagatggagatatataggtcatcatcgtgcgcgggccacttaaggggttgcatgtgatgatgcactgtcgcatgtggccccttaagcggccttcaatcgataatggttgcattattgcatgagggcgacttaaggggccgcatgcgatattttgtgcggcaccttaagccgatcacatgcgataatgcaacgattatcgcgtgcgggtagccacatgcaataaagcatgcggcctattaaccaaagagaaataggtgctataggatgaacaaaattgcttgtgtttatgtacagatagaggataaaagaaaagtgggctacatatttgtagctagttgcagctcgagcctcaataaactatgtgagagaaatagatggattcagtattaatcattatatatatacaactcaatattgtatgaatgaactattagattgactataaatgatgttttaatttttagagtcagtagttggctatattattaaacttactctagcaagggagagtacaagaccacatattcgacgcagtaactttttacatttcctaacgtaattcagcgcgtgggaacacgtcacgtcatgtacagtttgcgccagcctgaaaataattacttgatccagtttctctttggagaaaaaggcagacgctatgttccgtgaaacacacacgggatttgaaatacgaatagagcgtactttcctttttgtaaaactcatgaactgtacgaatacgtatgcactaaaagttcagttatatggctggcaaagcagagcatatcgagtcatgtagtcaactggaaacatggcacatatatatcgatcgcgtcttcaaactcccatcgatcgagacggcgtcaacgcggtgaaaacgcacgcgcacacgtacgatccggtagccatcatgtcatcagttggcagccggccggcctcgtgcgttcagtaactgaattttcagttgttgctttattacgttggctataaatatacgctcggtttgcatggatatcttctcatcatcacacagcaagtaattcgatcttaatctcatcacattcagtgagaagagaagggatataaacgatggcgtccaagggtttactcgtgttcactctgctgctcgctgctgccttcctcgtcaactgcgctcgacaagaacctcgtacgggacgcaattaattaactgcatgcacgaattagctaattaaatgtccatgttaacatccatgtttgttgtttttttttttccttatctgtagcagcgccacaacgcacaaaagcgttcatccatgacaaataaatcatctgctatatatatactgcatatgcgttcagtgttcttagcatatatgtatgcgtctgctatatatacttttcagatcagaactcacgtttatatgtacgtgcagagcccaacgagggaccgacagctgaccccgacgccggcgccggcggcgaccacggaacgtcatcgggcaacggcaaagcgtcgggccatcggccgcaggcgaaattcggcggcggctgctgctgcggcgccggttgcagcgagcagtgcgccgagtgccctcgccctccacatccacccccatctccatctccatgcgtccatcccccctgctgcgagtcggccgccggctgctgctgcaatggatgcagcggcggcggttgcggtggtggtcagtgcccgccatctccgtcatgcgagaatcatcatcctccctgcaagccgggctgctgctgctgcggatgcagcggcggcgagtgccctccgcctccatctccgccgtgccagcatgagtgccctccaactccgccatgcgagcatcctccctgcagcgagtcgggctgctgcgacaagggttgcaacagctgctgcaaccggtgcggcgagtacggacagtcccgcccctagacacgtacaaaaaatgctacagtagctactaccgtcccgttacgtacgtacgtacgtgatactaataataactacgtactgctcgtattagagggtacttgcttgttatctgcttgaataagtttgggcgtgcatatatatatgtacgtctcagtctgtgtgtgccgggtagttattcccaattaagtgcgtttagttttaccagtaatttgtatggtgtgtactcgtgtgttctcgtagtgtattgtaagtggatcacgtgtgctatttatgaataataaaaggggcggtggagcaacgtgatgcttatattctatattttttagaaatggaaatagattacatctcgaccggtttctatcataacgcacataatacagatataatagttttattgcaaaaaaaaaactttgatagaaaagacttataacaagatggaaaatgtccccaacttcaattccttgccattgcatagcattaatagaattatacaattctagggagaatgctcccacccaggagcccgattccagctaaaaaaaatcaaccaccaaagataacctccctatttttctctcaattctagccacacatgcacgcaaagcctctacaccttcctactcctctccaataactaccaagagcaaatctttaaaaaaaaattctcctaaactatgtacccgatttaggatctaattatactattatgtttgttgtaattaaatttttacaacaaaatcttgcatcattatattctgagaaaaaagtatattttatttttttaatgggtgtatttttttaatttttcaatgagtattcatattatttcactagaacatttaccgatgttgcatgtgatgttcttttggatgttttcatcaattattttatgatgtttcaaccactacgaataaatgtttcgtgtgtgatctaaaaaaatgtttcaataaaattaagtatatgtaaatatatagtatgttatgtatgagttctcttatgtttcactcgttgggactcaatgtttcgggcaatagttgtcggtggtgcagttggtgtttttcaaatgtggcgtctctctgaaatattttataaatttatttgaaacattttttataagcaatgaaacaatactcgattttttatgaatattgttttatcaaaacataatcatgtaagatcttattgtaaagatttaattataatgaattgaatggtataatcagtttatagattgagaatacaatttaagagaaataaatgtttcaagattagaaaagaaatgttgttactgaaaaacaaaggagagagaaagagggtttgcatgtgcacgcaaacagtgggcttgagagtgggcttgagaggagccaagaggtatcctgatagcaacggggtgcccgatcttccttcaggtgaagataactatcgatttggtgaaaacttgatacacacgatccggctttcgatcaacacaatctaaaccctgcaatcgcagcaccacatctcctctggttatcaactgtgccgaaacccgatcgacctcaccgagaaggctaatctctgcaggtgaatcgaagaatacaagcaagaacaagaaaaataacaacccaattacagatgaatgattattcaataattcgaagttagggtttcacaaaccaatgtagtagcgaaattgcgatggcagaagtaatctaagtaaaacctaaccctaactcaatgacgactactaaatatataggttctagggttgactttagacccctggacacgtccctattagactccgacacgatacacggcccaacgggcccaaagacggtgacgcagcacccggacagattttgaacatcttcttgattctaatattcccgttgactcggaaggaattttgatgtgggaccagatccattggaaatgtggtctcattagctttccatacatatgtagaacgttgaaatcggagtccaaatgcaacctgagcgacgaatttagtgtggacttctcctagagcccgaagtgaactcaaacttgatttgagtcggacctccatcttgacttgaacatccatgatgaccttgtccatctcctagcctctctccaagtgctccatggtcctctctatggtttctaatcataattaaatcattaggtagcaatctattctcaagagtatataaagaagtacttaggaacgagctcacctataaatttaattgccgggcgcgagctctagtgattggaccttacaaaacaacttgaggagtagcgtgtgtatccaaaggagtgatgtcctcatcatctcccatgcatataggccggggacgtatggagctcttgattttttttgccgaatcgggcacccgatccaaagttttgatctccaaattctagccaatactctatctatcccagtttgatcatcacataaggtgtttaaggtctttcaaaaataattatcctctaacaactgcatttttttttaattgtgtcaagagtaaatgagcatcattgaatgcaccgcatgcaaccaaccaagattaatttctattggtccaactacatgcgatatttaaaacttgatgcaatccacggaacacaaagcgacgtagcatcttaatcgatgagaatttattacacaatgatgaacgttttattgtccttggtctctgcactctttgtttaggtgatgatcaaaatgggatagagggagtaattattaggacactacatcacatctatagtgaagcctacttttgagataggtacattctacataagtagacatgccatgtattttttcatgtatatatcttttgttataaactcttgaaagcgcggcatattcatcgacctaccataggacctttcttgaaacacagaaattttacaggattttcacataaattaatttaactcccatgatatttgtctaaaatcctctattctgaacgatagcaaagagggaaagtaagaaacgctctttatacaagctctccaactttataacgcggggtagtagctcgcataaactttgtttagcatgcaaagaacgagccaaatttagaccaaaacctccttctttgaagatagcgtgccattgtcaaacagcttcccaagtaaaccggcaattaattaaaccggcaatttctttaccgtgtacagtgtacacataagttagttgttacagtctcatcaagttgtcagattggagacaccatcttcgatactttcctcttcctcgtcctcctcgaagtctccttcctcgtcttcctcctcttcctctgcgagggtctcctgtggcactcgttcagggacttggtaaggtccatgtttctgcagactccaatacatgatgcttgcagtaagaaccaggatcatctttggattcacctgccacaggaaaaatagaaagcacaaattactgccttaactttgggttgccaattagtcgccaagctagaaattacgcgaaagactaggataaatttcttggtttattcagtgaagttttgaaattcattatctaagtactgtcaaatattgccatggatctaagaaccattgaaccagtttccctgtgtttacctccattatgtcctctggcaacatgaagagggtgcacccaagcttcctagcaacactgatggtgtaagtggcatttgatttcttctcttcatctgtagccaataaaaataaaatgaaataataggtaatcgtgaagcgacaggttaaaacaatgaaaaatcttaagttgaaacaagaatagtgtgcaggagaccaatgatacacaccatcctcccccttcttcaccatgctcaagtcaacatgcctgtggttaacagcgtggagaagctctaggaagaaaactccatttgctatgcttttatcctaaaaaatcaatgcgtattactgtaaggtcagccgatgagacaattgctaaaattaagtgaaacagggaaggttgatgaaccttgaagttttcaatacaggatgttttgcctgattccttgaccttattatttgcccaaatgagaatatcagcatcggttatctctttgtctttggaatgggttctcaggttttttagcaattgtaggatactagtcctcatgagttgccacaggaaagcttgaaaatgagaattaagcaaacgtcaaggccaacataaaaatcaattacaaagtcgaaaaataccaattcaatggattattttttaggtttcttttacccatttatttctctcatttcccccctcttacatgaaatagctgccaatgattatcaataccccttacatgcaagtgccatcctcagatcctctatatgagtgtgtgtttgtgtgtgtgtttattttccacaaataaatacttcagtaaaatcagctacaaatgcatggatataatatctgtttgctccatttttgcaggagaagaaactgtcatccatattgattaataatgtgacaagggttcaaaacaatattgtaaggaatgtaaaagcaactgaactatatgcagtagtttacctagaattagcttcttatttccttgaacaatgtcatttcctgaaatgttaaccacagagaattttaactcctttccgatttcgataacctggttgccgttctccacctttctaaaaggcataatgattggtggcttagaagcttgcttccagttaactattcctggagaaattttgtcaagaacctctaacaggacccatctgcaaaaatacttccctcagataccaaaatataaatcaagaaaagtcatgatgtagttaaagatgggacttacccagtccttacatcctcaaacaaattgttaacataagttgcaattccaaggctgttgatccacaaacgaaatgctctctcttccctggttgcttcaacgtcatctggagtgtcttgaacaacaggagccacattgttgtctgacaggccatttctgcaatcatttcgtactatgcattaacaaagaggaaaaggattttaaactgttagagtatatggtttctgcaatagaaaacgtctgaaatttctttgtggttaagacagataaaagaagatcaaatcctaacaaattaatgatgtattgtgagtccttgcctgaggtgaacaaaattattactagatacaaaagatcggttcactgcactgcacttacctgtggtggaatatttgagcaacaaaagccaagttgagatttgcagaaccctccacaatatctttagacgttacatatctagtacactcgagcttttctgcagtttcaagaactttctttgccctttcattaggatctgaagtttctatcatggttgtggagctaagttcgggagctagggtgttgagaaggtaagcatatgcttcgccatcctgcaattacattattcataagaaacaaaataatgaaaccaaatataaagaagccgttacattttattagcattttctagaatgtggttgtgatataggaaattccatccctctatcataaacatggcacaacagtaaaaagaatatctaagctataagaagatattctaaaggctgcgcattgtccagatctatgttagaaaaaaaaaatatattatgatatattcataccttaacatcagtagagaagtttgtcacagttttcttgtaccctgctttcttaagatgaaagttcatccatttgagcaacatcttatctggtgctaatgtgactagctcctctgcttcctgtataatatcatagcaacatagatttgacagattatgttcaagaaaatccatgcacaaacagttaagtacttcattattcaaagttcaaaccttgctattatcatcagccaccaactctgccaactgaggtgtcttctttaaattcagatcagctaacagttgtatctgtgaaatgaaaatcataataaatgaccaactgaaattgatatgagatgatgtggcatgtgcatttttgctgatttttctatttaatatttgacatggtggtggcaaattgacaattatcacatacctttatgatttgggataacaaaccaagaactagatgaggctgcaataagaaagatatttcagtgatcaaaacaatgttaacaatttagtcatactccatatagtcacaaaaaatgtgttgtagacatacatcaagtcaggatttgaaaactttgtgaatgaatatttgtttatagtagttcaatggatacaagaaaatcatctatagactcttcttggaaaatactttcatgatattttaatttattgagttttaaaaatacaacggaaatcagtggtcaaagttacatttgaaagaccatgtcaatgcctcacatgacatgttttcatgatgagggatagataaagtacagtaaagtaactaaagtaccggtaacttttatactcatcgaataatcggttaatacaaaaaagaaaacttcctaaatatcattgacatggaatacaacttcaaacattcattccatgattttttttttagttgcctacattgcatttgtagttatgccagcctaaaaatagcatcattataaaatgtgtttttttcagataaatctctattgctttactaattttgataggatgatgagccacaagggaacataatgaattgaataattaaatagtaaaaagtaaggaagtcatgagaactatttgaagtttgcaaagtttcatcaaggaaaatagtagcacaaaagacatactctagcttcaatcaagtcctgtgtgccaatgttaacaacagtgcagccaatggcctttgcagagttaagacaaagggtgtgattctcattcctctcccacgggttagggtccttctttgtattgattgctctctcatcgattgtacccggaacagcgacattgatcaacttgctgattcagtgcatgataaggaaataactgccttagagaacagttatccttggatcaaaacgacgaaaatatcgtcgtactaaaataatatatatggacactgacaagaacaaactaaccaaagtagaacaccatcccggacaagattaaatatatcatttgtggatggatccaaaggtaagaaattcttcaggaaagaatcctctcccaggaaattgttgatgtggttgacataagatgttttctcagactcattaatgacgtgcaagagagtagttgttgaggccttcaaaaaagacacagatcccttcaatttctttttgcctcctgttttgctgctcccctttgcttgaagatttaagtactcctaataaagtgcaaccatcaacgaatttatttcccaaatataaatgaaaaatcataactaaaagtattagataagtcaagataatccactgtaccctgaggaatgactcgaactctattgtttggttcatatcgggataagactcgcctaaaaaagtgctaatctcttcctcagatagaacctcatggatgcccctaagcttctccattaccggtggcaaatcttttacagctacatgatccgcatccgatttcttcacggacacaaactatagaagtgaaacataagaggtagcaatgtgattgtgcaattatggaataacagaatttttcacatggatgaaatcccccctggtgcttactttggtttttagagttcgtagctgcacttgggtgaactggctctgaagccatggatctgacacaagaaccccaacgaagctagacattgccttccaaaatcaatgtattcttgtccctaattatttctcacacaaattcctcaattcttgcagacctggaaccatccttaatcgattagactaggcatcaatctcttacaatttcagcgtaatattttgcaatattcatcaatacagataaacgaaggttacttgcaacacccataaaaggaagatagaacaaatcagcaccaaacctttctatcaagaaaagaaaatgggggcagatttcgcttcctcttccttcctcccagctctcgaaatcattcactccatacacattccttccagctcccgagcaaaccccaagaatggtggggagggggacgtgtggttggattgcgggaagccatagggaagaagaagggctaaaatttgtgacgcgagaaagtaaccccgcgagagaggaagctaaaaaggcggctcctttcttggtcccccgcaaacgcctggaatagcaaaagaaaaaaaaaagaagaccaatcttagaagatggaaacttgttgctactcactcggcatcatcttctcctccttcttgagagagatgcaacactcggaatctacttctctgccatggcgattggagtggagatgaatgaacagaacgccgtcttgggaatgcctggaaagaaaaaaaaatccagttgaggatgttaattgaaaaattaaaaaaaaagagtatcttccaaaagatttttataaccatgtcatacatatttttaatttttggattaaaatccaatagacacaatagaagtaaaaaaaacaactaagaaacaccataatggatcctaattaccatatcttcaacaaaaagaccaaatccaatataaattttaaaacttacacgtgaagattcaaaaatttacattgtaacttacaaaaattacaatgtaagttttataaattacattgtaacttataagaaaatacactgtaaatttgagtgagaaaatcggtgaaagataagaaaaaaaatctttcgagtgagatataacaaaatcgaaaaaaaaatagcttccctgcagtttgggccgggcctaagaaacgtggctggcccaacaaatgctacacctggacctgagaagggcatgacgtctccagtttaccttcttttttttttacaaactccagtttactaatgatattcggggaaaactcattgctgcttttttttctgatttttttgggagaaaaaaaaacatcattgctttattgcactgtttccaacaataatttgattcgcctattgatgtattctttggatttgggtttgggcattcccaacccaataactaggatggtgttcatatcattaaataatttgccacctaggaaaaaaatgatgtggcaagtgaataaatgaggaaagagaaggaaacaatgtcttgcatgagacatggtttctacacaacatccaatacatcatgtgagataagtagcattaaattaaagtatggaatagtggtgtttgtattgaaagagtagtgtctagtactagtttcttaataatgtggagtttatgaaaaccatgtctattgttatgggttgggactacccttaatctagtacgtaacagggctactctgtcacaatgattcccagcagtttgggccgggcctaagaaacgtgtctggcccaacaaatgctataactgggcctgaaaatgacatgacatctccagtttaccttttcttttttttacaaactccagtttacaataatattcggggaaaattcattgctgtttttttatgatttttttgggagaaaaaagcagcattgctttattgtactgtttctgcaacaataatttgattcgcttattgatgtattgttcctataaaaaaccagtctaacaccgaatatgacacatcctaatacaacaaatctagatatacatatgtccagatttataatactagaatgtgtcacatccaatcctagattcgtttatttataaaatggagggagtatgtaacagggctactctgtcacaatattaggggtgaaaacggatcggataatatctaatccgatccgctccgaatctgtccgaaacgaggatatggtatgggcttctagaaatccggcggatgcggatgcggatagtatgagacggacgcggaaatggtatctctaaaatccggcggatgcggattatccgatatttttgtcggataatccaaaattatcaacatatatatataatcactctatttgttgcatataacataagttagtacatccaatgccctaattcatcaattaacatagtagatcttttagtctaaggcttttatcatctcatgtcacactcatgtagctataatttttatattatgagcatcatgtattcatgttgtttagcacttaattatataattattacgatgggtcatttgttgattattgtattattgttccttgtttgctaactcaatgttgcattgattgcatatacacgtaacatccgataaatttaatccgtttccgaaccgattccacacctactccgcaccatttctgacatccgaaacaatccgctccgcatccgtacactatccgcacccgctccgaatccgcttaaaaaatactccctccattccataatacaagggacaaccactttttttaatatgtttcataatataaggcatgcatgcatgtaggcaattaactatggccccttctccattaaattattacttttttaaatcctccactctcatgttctctaattatattggatgcatgcattgtatttattaggatgatacaaacaatatgataataattatttttcttggtctttgagttaggggtggttatgccttatattttggaatggagggagtatagtttaggatatggtatgaccgctatccgtccgaatccgctctgttttcacccctacacaatattacctacaaaaatttcaattatacggtacccatctattcatctcacgataacatgattttatatggaaccaaacacttttttttgggtttatctccaccttacaaatttggatgatgcaaaaacttggccactttatccgcacccgctccgaatccgtacactatccgcacccgctccaaatccgcttaaaaaatactccctccattccataatacaagggacaaccacttttttttaagatgttttataatgtaagacatgcattcatgtaggcaattaactatggccacttctccattaaattattacttttttaaatcctccactctcatgttctctaattatattggatgcatgcattgtatttattaggatgatacaaacaagatgataataattatttttcttggtctttgagttaggggtggttatgccttatattttggaatggagggagtatagtttaggatatggtatgaccgctatccgtccgaatccgctccgttttcacccctacacaatattacctacaaaaatttcaattatacggtacccatctattcatctcacgataacatgattttatatggaaccaaacactttttttgggtttatctccaccttacaaatttggatgatgcaaaaacttggccactttaatactaccaaagttttcggggtgtgtcagtccaaaccaacctaaaaatgtagcgctcgcccattaatatcggtcattcctaagagctaataatatagccgatttgttggctataaggttatttgtatcattctcttatcttatccatataatagttagctcttcacaattaatacagggcccacttgtctctctcacagagtttcttggttattgtgtccaagccggctgtaagtttacagcccgcttctcctctcttctcttctccacctcagtatttagccggcttatagcctattattatacttgctctaacacatgcagtttgcctttgtgctttccctcgagctgacatttttgtcgcaaaggcaaattaaaatggtcaattggcatcacatcactttataatttgtatacaccactttgcatgtgtcaagaataaccatgcatattactcctaccttagatggttagacctatcggataagattaattgacatgggctacatttgtcaaagttaaagaaggagcatggttgaaccctatgaatccacatccgccgtacatataccattcattttgtgaagattatagtgaacaaatgagactatacaaatgcaccagtagctctgctactaaagccagacaaactatatcctaagttgtgtctgatacaaatgtgaagcttaattggcccacaaccgatatgtaatcctgtttgtgtttatttttaggggcaattgcttatttgaccctgttttgaagcttaactaccaatatggccctactttttctagtttgcttatttgaccctacttttttaaaacgaacactccatttggccctgttttttaacactgttaagttttcatttttttaaaaaagaaagaaatgcaattattttttgtaatgactaaaatacccttgaccaaaccctatccatatctacatctctccccgtattccgtctctctctctctctctctgagtgctggcggcggcggcgactcgtggagggagagcggcggagaccgcgaggtgcggcggcgatggctcatggagggagagcgccggtgactgcgaggtgcggcagcgaccgcgaggttgtaagttcaaatgccttaatttggtttcggtgattaatgacaaatctaattatatgagactaacgtttttatgagcctttctttgactagtctcatttggatatggaagtaaaaatgataagaggtatgtattaaacttcacatattctaacttggtctctcttgtggatccaaaatatagtgtgagcttcctatttgatctttattgattatgtgcatatgcgttccttcatatccatatgtatgcacatcttgagggggagcttattctatattttatttattataagatttctatcttgatttgaaatcatttttcatctcatctctctatattgtttatatcgggttattatccatcaccaaagagagaaaagattgaaagatcttggattaaacaatttgtgtaattgttactttggtgatagatgataaaccgatgtttatgggattaacctctcttttgcataagttgtctactaggttattttccgataatgagatgtggaagacatgcattcttttgtgatggaccttaatcatgacaagaatgaaatgcatggagataaaacgatatgtaccacttcttatctcctactttttgataggttcatatatatgatttccatgttattgatatataagtgtgagactaatgtttgctcgaatgttatcttatttagtctcatttacattgagaacatggagatcatgaaggtatatgttttatgttggtctacatcattactacatatgccttctctatatgtataggataaacccccattggtcattctctaattatgcatacacttgcatctcttgtatatttatttgtatgcatatatttagggggagcaaatcctatacatttattgtgcatgttctagatccatgttgttcacctattatttatatcggatctttgcacttgagattgcatacgagtatatgacacttgtgatattaatgaatactcaacaaacatatacatatctttcatatgtaaccggttggtcatcaagtgaaggatgacaaccgatttgttgagactaatgttctcctttgaggtgtgaaaaggaataggtcccactacgatgaggctaatgaatgacaccatgggttagtggtcaccaagccaaggacatcgtcatgttggcaagaatgaagtcaagcttgtgatgagaataaagtcttgacaaaggatggacaagacctcggcataaacatggttcaaccggatgctcacaagtgttgatctcggctcaagcttgaccccaagatggatggcgcaaggcaaaggtataatgtagctaagaatgttttcttagtcttttcccggtcttggtgtttggtgtagaccgaatttgctagataggcgtcgtactatcaagaggggtctatgaagtgagcttgtggatgatcttgtgccatattagttcatatgcatgtaggtgcattttgtgggcttgtctaaccaagtgtgatgagttttctcaagtcctaaaccaagagagaagtgggcatgtccaataggagtgagtgacatcttgtgggtatgtccggtggatatcctttggagtgtgagccctttatccttgacttaagttgtgtttattggatggatttttcatggtttggatggccctttgaataagctttccatagagtctaagaactccaaattccgagacccgagtcaagagatatcgtcattttactaacggtcggttgagctgaaaagtgacctgcggtctgaccgtgggccttaggccggtctgaccgggtctgttagccggtctgaccggcgtggtaaggccggtttgaccggccccactggtctgttgcactggtctggttttttgtggcgatacagagccgccagagccgcaactggtcagaccgagccgacggcggtctgaccgagccgtggacggtctgaccggccactacactgcggtcagatcggccaggttgagtgggctcaatgattgccctgtaacggctagttttctagccgttacaaagtagtccggtctgaccggcctcacaacagcggtctgatcgacagagcacaaagttggggatttcggttccaacggctagttttggtggttgggggtatatatacccactccttagcagcaagggtaaggttttggcactccattgcattatcttgaacccttgcaagagctctcacacccttgtgcacttagtttatctagtgaggtgttagagagtgagttaagccaatccaagtgcgttgcttcattgttatagctagtgtggcacttgatcatactcggcaagcatcctagacttgttactcttggaggttgccgcctcctagacgcttgtggaggtgttgcccggtgacctctccgaggagattgtggaggaggcccggcaccgtttgtgagtggtttggagttcaccaccttcggagtgaaggaagaactaccccgagtgatcgaggcttgggtagtcctctccatgggccggctcccgccttgcccaccccttgacgaagggggcgtgcggtggcttcgtggttgagcggtggagttgggatcgcctcaacggggattaggaagctggcgagtttccgaacctcggtgaaaaattccttgtctcttgtctcatttatttgttgcatttacatttgtgctatttacattcatagaaacatatttgagcccatatcacttaggtttgcaaaacttaacttagttgcttagtaaaccttgcatctcaccttgcctagcaacttaggttagttttgtttaagtgccattaagttttaaaactgcctattcacccccctctagtcggcctccttgatcctacagaggtgctgcggcggcggagctggctcgcggagggaggagcagcggcgaccgtgaggtgcggaggaaacggccgtggcggccgtggggggatccgtgccggcgccgccgtcgtcggtcgtcttcctcgtcaccgagccgccgctcctccgccgccagcggagggccgccttgtcgcctatcgtattcctcgtcgccgagctaccgctccttcgcagccaccgccagcggagggccgcctcgtcgccgagccgccgcagctcctccgcagccctccgcatccgccgccagcggcggccctccgcgtcgcgccgttgagccgccgctcctccgccaccagcgcctcatcgccaagctgccgccgctcttccgcgtcgcgccgccgagccgccgcttctccgcagtgctctggagagagaaagagagtagagagagtgtgtggataagaatgagtggtagaggatagatggatgtattaggggcattttcatcattttaccccttagttaacggtgttaactcgtcttaacggaatagggtcagctttcctcttcgattttgaaaagcagtgtcaaattggtagttagctttcaaaacagggtcaaataagcaattgaccttttttttaaggtggctaaagctttatcgtgtttgtattgatagggcaatgtgtttgggtacttatactctctctcgtttcaaagaacctgtcactagattactatttatttttttaaaactttaaccgctctgtttttttttgccaaaatattatatgtacaagtgtatatatcatactagttggggaaaatttttgggtttggttcagatcggatgtacaaacacacatttgaagtatcaaacgtagtctaataacaaaacaaattacagattccgtcagaaaactgtgagattaatttattaagcataattaatacgccattagcaaatgtttagtagcaccacattgtcaaatcatggcgcaattaggcttaaaagatttatctcgcaatttacacgtaatctctgtaattgtttttttatacatttaactaggtgaaaccccgtgcattgctgcgggaatttagtatgataacaataaaaaaaataacgtataagatagctagataacatcagattaagtaaattaaaatactttatgataatttaaatttaaatagtatgtagaatggtgatttaaacgtaaaaagtaaggtggtatgactttatggaagaacaaaagtagggagatagtttggaccgtagattaatcatctaaatataaaaaaattgatgtgatatgacttaattagagaaaaaaaaggagaaagataatttggaccatagattaatcatttaagcactaactaagtaaagatgaactatataagtatataggatatcataaaacataataaagatatacactgcaacattatgtgaattatattagatgataatttaacatgtttgtatttgaaaagctcttaaagtataaaaactataaagatatagcatgtttgcatgatgtttaaatgcgatgattgttagtggataatgatgtgacatcttattagtggatgatgatgtgacatctttatatgttaagcttaaaaagttagtggaggataactttatagtaagatagaatactatatgtatgtgtgaaaacattagatgtgacagcgtgaaaatttttattttgagaactaaacaaactaagcctaaataatctgaattataaatattctaggacggaggtattacaaatcagccaaggctcaggctctccggtacacccgctcaccagataacatccgcaccgtacgcgtcccgtcgccatcgcgcccgcaaaaacacaggcaagcacacgctcgcagtcgcagctgacccagccgacgaagcaagtgcgctccagcactgcacagcgctcgcccgagtcgtcgcccctccccccctcccaccgaattcctttcaccacgcggccactcgcgcgaaccccttccccaccgcgccattctcactgatcggtggggcccacagcacggcgcaccgagcacgcgaccgcggcgcaaaaccaaaccaaaccaaagaacagcagcgcacaggggctacgcggcgccaccggctcacatatcacctcacctcacctcatcatccagtagtaggggaacatactcgagcacgtacactgcggggcccgcaggttgtgggacccaccccggcatccataccgggggagggaggtgggcccacctggcatccgagaataggagggcatccgaacagtgacgggagggggcccacaacgtgggagtcatgtggagactggagaattttttttttttttttttgccgtctcggcgttgccatttgccaagctggccatctggccatgagctgtatccattttccgacagcttgtagtattttctttccttccttccttccttccggaaaccttttcttccttttaggagaggattttataattccttacctttgcaactttttcacgtacttcacctgattcacaaactctgtgttctgtttttgttcgtttggtaaaaaattatctctgccttctgcctacaacagcgatgagctggatggccagaaggtagggtttgtgaaagcgctactccctcctgctaattgtagctcagatatcaattataatttatacatatacttgatcattatatcttttattatgtattgatataaaagttctcttcttaattaattattatgataattcattttttgaaaaaatattaattgttttatataaccatttaagatctatttcacactagtacatttactctgataacaaactttatatattcatcatcactactatatcaataacatcaagacattgcatatattgatttacttaaacgccattcctgaggattagcgcaccatgccatcgattttttcctagaaaaactcttgctctttccgctaattagttataaaggattttgtgtgtatggatatgcatatactaattttcttctatgcaccgataacaagtagatctaaggaatgaataatgatcatttgagaataaacctaaataaaatgtaatgatcaattgaaaaattttcaatagagggtactattatcatttatccatgggcatcatgagacactaacactaagaaaagttaatgcaaaaataactacatatgttgttccataattttttcgtttgatatttaattcacgataccagtatatactagtataaactagccttttttaagagcgccacccagcgttttgattaggtcgttgttggaccttcgatcagggtcctgtttgtaagattagcacagggctaattttgagagttaatgtttagttatgaattagtttactaaacattagtctagggtgatatgtttggatccatgggctaattcaaggctaaaaggtggagagagagagagtagaaagagaggagagagagaaggagagagagggctgctttttgatggtccccacactaaattagccccattagcaccccttggaggggctaatgttttgaggggggttaattcatattagctcaaaattagctcacctgtttagatccttaagggctaatttgaggctaaaatgtgagggctaaacattagtccatagaaccaaatagggcctaggtttctggttgggtcatcaggatttggcttagtttaaacgatcaagcccatggttaagaagatgaatcctactatctttttataggtttttgctacatgtctgtcgtgtgatttttttcttagccatttcacgtttttttagtcgcacgatatgtgggccaagaattagtggtggggctgcacgcgtggataaggccgtgcgttggatgcttaggcccagttcttttctaaataaaaattgatttctttaatggttgaaaaattaagacatttgaaactaaaatataaaattacagtcttatataactaaaattacatatgtaaatttagttgatatgacatgtaagtgcactgtaattttgataaaaatgttatgtaagtaaatttatattcgttattttatttaaaatataaaattacagtcctatataactaaaattacatatgtaaatttagttgatatgacatgtaagtgtactgtaattttgataaaaatattgtgtaagtaaatttatattagttattttattccaaatataaaattacagtcttatataactaaaattacatatgtaaatttatttgatatgacatatataattttgataaaaatgttgtgtaagtaaatttgtattagttattttattccaaatgtaaaaattatagtcctatataactaaaattacatatataaatttagttgatatgatatgtaagtgcaatgtaattttgataaaagtattgtgtaagtaaatttatattagttattttattttaaatataaaatgacagtcctatataactaaaattacatatgtaaatttagttgatatgacatgtaattgcactgtaattttgataaaaatattgtgtaagtaaatttatattagttatttattttgtagtccgttggatgcaaatctaagtggtttctcgaaaattacccgagtgatgcataggcagttcctttttatataaaagaaaatcccactgttacttatccatgaaccgatgaacgcgtcccaatgcacaacctagtggcaaattgacatgcaccggagtttttgaccctcctctctatcctatatacgactataattaattaagcacgcaggttcggtagaaagcaaacattaacaacatctaagtatctgacacagtgttttaagaaacaaacccatctgggtgcatgggtctgttccatacttcatattccttgggctagtgaccacaactgcgcaactgaccatctcctatccatttgaacacgacgaagataagaataagtaggacacacagaaccaaaaagtcgcgtgattaattagttttaattattataaatttaaataatttaggatatatatatacacacatacatacatacttcttccgtttcacagtgtaaattattctagcatttaccacatttatatatatatgttaatgaatctagatagatatattaacatcaatatgaatgtggtaaatgctaaaatgacttacattttgaaacggaaggagtataacttttgcacgtttaataatttgaaaaatgtattaacagaaatcaagataacaaaggatgttttttcttttttcttctttagttacttaggccttgtttggatcctccgagctattaaatagccctccggaatcttattatttaggagtattaaacttagattaccaataaaaccgattccataacacctaggctattttgcgagacgaatctaatgatatatattaatacatgattagcggctaattactgtagcatcactgtagcaaatcatggattaatatacctcattagattcgtctcgcaaaataacctagaggttatggaatcggttttatcggtaatctaagtttaatactcctaaacagtaagatttcggagggctatttaatagtcctccgaatccaaacaggaccttagtgaccgtttatttggttggtggctagtttgccacaccaaactttagatgagccgcaatttcatatttcattagcatactggcccatgcgtcatactctagtttttttagccaaagcttataccgtagtagttgtggcttgtgtaaatatgtggcttttgctacagttaatagcaaatggagttatggtaaagttagcctccaaccaaacagccctaagagcaggtacaatagcaggctataagccagctataaacatattttaaagagataaataaagagagagaagagcagcgggctacagatctgtagccagctgcagcacggactccaagacataatatgtgtatgacaggtaggattaggtattaataatatagtaaactactattgtatgaattggctatagatgatttggagttaggccctgtttagttccaaagtttttttttccaaactttcaacttttcattacatcaaacctttcatacacacacaacttttctaccacatcgtaccaatttcaaccaaacttccaaatttcagtgtgaactaaacacagccttagtatttagctatactattaaacttgctctaatacaggttgcacgtgcccttctaaacaatcgaagtaccaggagagagagagagagaggaggcgccgcgtcatccaagacgtttttggttgcgtacatttcgttgggtggacggcgcctcctgtctggccgctccatctcgatcggcgcttcgcttcggttcccgtcgatcgcgggccaacagaacccgcgcgtggaacgctgagcccgcagcaacacacgcacataggagtactactagtacgagacacccaactaactgctccacttggacgcagcaaaccaaccaaccaaccgcaggaggttagtagtacgagagctcatctcttgtcatgtgcgcgcgcggcgccacatcggtttcgcgcatcatcggtgtttcgcaggagatggggcttcgattcgggggggagcagccagcacgccgcgccacgcgataaatttattccccggagcactggtttccgagggggtcccccagcttttggtggtatgcgaaaaccgcctatccaccgaggctccggtgcggtgcgaccacgtacgtactcgcagcggctatgctacctgtacacacatagtacgcctgtactgtgggcgatcgagcccctttttgttgcgtcaggacgggggaaattttccgcacggccatgcccatttttgtgttttgcctggttggcgcgacctgcgtgtcactagctatggatgtttaggtcctattattaataaggctgtgttcggatataaggttgggaacacttatgctgcgcatagaaaacgaaacaatttattaacgcgtgattaattaagtattattattttttttaaaatagattaatataattttttaagtaactttcgtatataattttttttttaaaaaaaaacattgtttatcagtttgaaaagcgtgctaacggaacacgagaaagagggctggaaaataccgatcatagccttaaaatggatgtttaggtctaaaattaatggctcgtgaagattgtaatgcttactttccaattgctataggtctctgcatttttagctttgtttgctctaaaataggaaacggttaattacacaactttgaaattcgatgtgaatgaaaaattgaaaaccatatgctttatcgaactgatcagtctggaagcatgtagcctcgccgtataaattgctgtcaaaccatcgataattcatagtacaatttgtatcttgctctaagtaatttcaaacccaaggatcaatctaataactatctattattttactataactgtttgacacacctctagatcttaatctactgtggattacattttacataagttaaatttaacagttaaaatttttatatttatctcaaaacatgaataatcatgacaaatgttgctacatgatattgtaactttttgactttagctgtaagacaatgcaagagtaaagttttgggagagagatcctaaaagttagatatttactcatggacatatgacctattaaaatattcattttcaattgaatagaaaataaattgtgtgaaatatcagaaaatacccctagaccaacatgtcagctctcatttctcttctctctattccctccccttaccatgcacatcggctgcagaatgcgtcgaaggagtgccgtccgaggggtcccatcatcgcctcctccctcgccggtgttgcttacgccgcccatgccctcgttgctcatgtcttactctgacttgcaccacataaattgcatgggacaatcctctagttttattaaaagaaaaaaaaagcttcatcaattcccgtctcttgtccccgagttttttttaacataaagaacacttatctattcttgaattgatgctcttctcaaatatgagaaatatcaaggctttcgtagcaactaatataatttctattttcatatgaattagtaaaattcgtataaaaatctttcaaatttctatatttcgaataaggcttataaaaacttaacctaattttcatgaacttaatcaccttgaaaattacatgggacctacaaagtacaaaccccacacaacctatcagtaagagttgacgaccatttcccaacttatgctctctcggtatgctacgaaatcaacggtggagcatgattggttgatcaaatcaaaacacacgcatttcggcctgattttgatcaaatcaaacccacatgcatttcacccccaatcaacaccctgtttctctcctagaatatcacgcaaactcaaccccactttttttttctctcgtttcgtggacgtacacaacacacaggacaggagcatcagcgagaagaaaaaagcgcaaacaaaacaatgagaaaaaaaaagatgatccttttttttttttggagagtcaggaaggttcacatttttttgacgaccacctcctcccctggtgccaccttctcctgttggcttcatcaccacagctcagcagcatcatcgccttcgccttcgcctccctcccttctccccgtctccatttcttttgtctctctctcgctcttcaaatccagctgctgccgtacgaacgcgcattgcctcagcagttcttggctcctcgcctcgcctccggttcgcctccggttcgcccccatctcggggttggaggtgagcttggagctccctgttcttggaggagccgctggttcagctggtggtgttcttcgatggggaggggcagccatggctgctccgttcttgggtcgtcgctgctgctgctgttctgtctgggctccgccgccgcgcagaaggcctcgacttggaagacactgagcggtaacattcactggtcctcccttcgtttcttggttctctgcttagtgatctgatctgggatgttcttgcgttttgggctcgagaggttacttctttaccagcaatttttggttttgtcccactgtttgggctggatctttaggatgaggatgaggtgaatgcttatttttgctcaaggttctattttttctttcagcaagatagttttgctgatgtttagcaccgcctgggtgaccagatttctgactggaagcttgtggccggccatataatgcttcctttttttttctttcttaaaaaaatttggtacggtaaccttttcaggtgagtgacatttgggttaggataccattgtcgcagcagtctgtgtgttaataatttacagcatgaccgcaagatgtttattgcttatgtgcatctcagggtgggattttctcaagtcactgtcttgtaggcttgtcatgttcacctggaggttgtgagaataggagtggtgctcgatgtatatgaacttcaaggacaaggagtgacttccttactgatttaccaatgataatgatcgattgttagctggttaacacattttaagtttaacgagttgtatgctcgtctgtttattgtagttatggattctgtgctgcggcagtgcgctgaaaatccacctcttttggacggtctggaaagcctaactaagtcatttcattgtttcaggcaatcctccagcaatcatcgccaagggcgggttttcaggcctttttcctgattccagtgattttgcttatggctttgttgcggcggccagctctccggatacagccctgtggtgtgatgttcaattaaccaaggatggtgcaggcatctgccttccggacatacgaatggataattgcacaaacatagctaatgtttatccaaaggggaagaagacttacagtgtcaatggtgtatctacgcctgggtggttttccgtggactatgacagcactgggttgagtaaagtaaactgtaagtgaaactcacaattttgtaattctaatattcttttatccttttcttttatcaagtgaactgtagactagtaatctcctgtttcttgtgtgttgggagaagaaaaatgctcaaatatatgcgcgttgtttcttgaaacaccataaaagagatacaaaacctatagtttcttcttgaataatgcagatcttctgcttgtcttaactaagtttgatatttgcagtggtacaatccctattctcccgtgtgccttactatgatggaactttacccatacttcctgttgaatctgtatttgctaattataaggcccctgctgtttggctaaatgtgcaggtagagctgaaactttaattacttcaagtcaactatgaattaagtgatactcccctcgttctaacagctgctctgtgcaaattgcagcatgacagtttctatagccagtttaatctgagtatgagaagctatatcctgtctgtttcaaaacaatatattgctgactacatctcatcacctgaagtgaacttccttaccagtttatcaggaagagttaacaagaagacaaagcttgtgtttcggcttcttaatgaactcgctgttgagccatctacaaaccagacatatggctcaatgttgaaaaatctaacattcatcaagacttttgcatctggaatacttgtccctaagaactatatctggcctgtaacacaagacaattatctgcagcccagcacatcggtcgttggtgatgctcataaagcaggactagaagtttatgccgctgattttgcaaatgactttttgctcagctacaactacagctatgatccattaacagaatatcttaacttcattgataatggtgccttctctgttgacggtgtattgactgatttccctattaccccttcagaggccattggtgagttggatgttgtgtcttttcttacaatgctatggatgtttgttcaagaaattcaggatgtttgttctctgttcaattattttatatattgtccctgcaggttgctttagtaacctcaacaacagcaagacagacaatggtatgcttgcttcctttgctcatgcatgcaacttccctatattaatgtagtattgaactccagtcttgacattttacttgcagcgaaacctctcatcatctcccacaatggtgctagtggtgactacccagattgcactgacctagcttatcaaaaggcagttactgatggtgcagatgtcatcgactgtcccgtacaagtaaccaaagatggcatacctatatgcatgagttccattgacctaatggatgtcactactgtttcaacgtcacaattttcttctcaaacgactgtcataaaagatatcaagaatggtgctggagtctattccttcaacctcacatgggatgatattgcgaagaacctgaagcgtaagtcaattttgaaatccttggtaaaactaaattttgtattgatatgcaaatatacatcatgatagtggggcctgtaagccttaagttatgtatgtataagtatgctcgagtcatctcattgttgtacaattagttaaacggtgaacaagtcatggttcatcttcatcaatcatctgttttgtttcatctatgaaatttattgcattcatcatgcatttgccaagactgacgtttttcatatttgcagccaagatatcaaacccaatgaccacatttgatgtgtacagaaatcctagaaacaagaatgcaggaagtttcatgagactatcggacttcttggcctttgcaaaaggaaaggagttgtcaggagtcatgatcagtatagaggtaatgatttaatacttggtaatgatgattttctatcgcagatccatatctgaatgcttttgtgctgtagtgttggcttttaggtagaacttcgatgaaaataattaggcggtctttgggatggctaatttgcaaataagtaaataatcctccaagatggtgcgatagttctggtacattagtggattcataatcaatcttgtgtctgaattctttggattttgttttacagaattaaacaaactgctaacttgtgcatacttgaacctctttagtacttaaaaacttgatgacttctgtgcctcatggtgtacacctgtagattctggaacaatgtgtaaatgtgcaatggagtgtgggctttgtttttgtggcataatgtatggttgctaaatttaaaattgattttgctatttactattgcttattgagtaagctagcaaaaaaaccaaagtaaagttcttcaaaatatttattataaaaatgcatatttctggagatgtggcaattcctcatggcccttactacattctcagttccatttccttttcaatttttgcagcatgctgcattcatggcagaaaaacttggatttggtgtagtagatgcggtgatcaaagcccttgatgactccggctatagcaaacagactgcccagaaagtcatgattcagtcaaccaacagctcagtactagtgaagttcaaggagcaaaccaagtacaaccttgtttacatgcttgaggaggatgtcagagatgctgcaccttcctcccttgcagatatcaagaagtttgctaatgctgtttcagtccgcacaacgtccatttacccggagagcaaacattatttgataaaccagaccagtcatatcgtccagaccctgcagtccgctggccttcccgtttatgtttacgtgctcatgaacgagtttgtttcgcaaccgaatgacttcttcgcagacgccacaacacagatcaacacatacgtgcagaagaaaggtgctggagtggatgggatcatcacagatttccctgcgacggtgcacagatacagacgtaagtttttcataacactctcatttagcacctcacccttaaatcatttcagtcctctgcattgaacatttctgaacgagtttttcgctcaccctccgccgttggattttcacctgtgcagtgagcccctgcacgagcaaggaaagcaacttgccgaccttcatgctgcctgtccagcccggtggcctcagcgggaccatcatcgatccagctgcacagccaccagcaatggcgccaatgcctctcttgacggactccgacgtcgcggaatcacccctaccgccggtcaagaacgtcacagctccagccccgggcgcttcacgagccatcaagatgcggaccgacgcctcgatcatcgtcgcgctgctggtgctatgcgcttctctgatcatatgatctaagtgtagtcttcacctctcctgtgtagcagaagcatggcggggctagagcttttgagaatttgtgttgagctacggatagttattctttttattttaccactcctacgtagccattcttttctcttctttttttttcttttgctgtattcttggggatggatgttcagcttgataccttgacgcctggcactattgtgggctgccgcccctagctactacattttggtacatatgtgtgatgcaatgaattgtttcagtttctggccgtatatctgaaatctgtctgaaatgctagttgggaatttgttgtgaggctgtttggtttgtttaatttagattattgagtggattattaatatgaatacatggataaattaaatatttttaaaaataatttaacaaatagattaaaacaagtgttctaagcaatgcaataggcaaaaaaaactttttgagaaaacatatgcttcgaaacatgaagcaaataatcaattttaaaaatctgataaataagttgaaaagaacgagccagatgatcaaagaccactcaattctgtggcagaattgagagaaccactcaactttgtgacaaaccagaattttttcagataagtccgttcacgagcggccacggctgacgcaatggcggtgtccgcctcgttgccggcggcgacgccggcggggaggcacgccgccgccgtgtacgtcgcggcggtgcccctgcgagggccgaagggcccggcccaggccctgatgtcggcgggctactcgctgggcctctgggacctgcagcacttcatggtgctcctccggcccgacccggcccgagcccaggtcagcccacccaatccgttcttctcttcctcttcctctcctctcacctcgatttctcgagatttctcgatcgtcttcgccatggcggggttgtttgcaggcgctggtgttcgatttccagccacgggacccggaggacgcgctcgccgccttcgccgtgctctcgcggagcgaaatccccggtaagttcgtcggcgcgcgcatccatggcgagaaccagtgcatgctaatcaagaagtaactaagtgtctgcaatggcgggttgcaggagtggtccggaggaggacgctgcggagggtcccggacacgaggtgctggctcgtcggccaccaccgcagcggcggcggcgccggcgccgccgcggcggtgctcgccgccgacgcgttcaccgcgcggtggccgaccgacctggtcgtcgggcggcacgactgccgagacttcaccaacggttggtctgccacctcgtgatggagttgatgcgtctcgatcgcttcttaaaaaaaaaagaaaagaaaaagaaaaatctcatttagttatctgaaaatcgtcgatgactcaatcgcttctaaaatctcttctctatttttttttggttctgattattgcaagggctcgtggaagaactgacaggtgagaaacgtgtcttggacgccctcagatcgtcagctgccaatggtgattggtgagagtggtgagtggtttcccctcttcttcttttctttcgtgtcatttcgttttcgcggtgcactgatgttgtttagtgagtgagttgttcgtgctcaagatattgttttgaaattattggtgatttggtagattgcttaccatttagtctattcactctcgcttcagcgtgccttgacatacagagcactatcctgataatttttcttcccttttctgctttgatgttctgtccttgagataatctgtcaactcattttgcagatcaatcagtctagagctgtgaaatgtgaactgctcggatggagattgaagcaaaattggtgatacttatcggtataatcgggtgaagtttttttactgaagcgtgtaggttcagtttgttactactagtttcttttccatgcccgacaacaattttaccatgtgtaatcatttactggcaaagtggagagaaaaatgatgacacccacagaagtatgtgtagagtggtgaccatgtagaacggtttagcatacaaatttatcctgaatctcgtttaccaaacgagttgtcgatttcaaccgagaggcgaacctccgcctttctcctccatcaaaagtgccaagtgtttctccattatcctcggcgaagaaagcttaagcttttatgtgcttatctaactccctggtccctgctgacccttgtacctggtgccctcaaacaatggcaagttgcaccccccatggtgtcttaggacatggtcatcgatcgccattgatggccacctctggcccaccccccttgcatgtatttccaaggaacaacttgcattgcattgccgactacttttgacatgatgatactgaaacagagtatgtatctagggtgttgactatctccattgatctttaccacaagcccaaaaggcaagaggggggcaagatccatttatcttgatctggaagctgaatggtaggatcacatatagtactactagtaggaggaaatggaagcattgtcaactcagagattatcacatacccaacaagagcaggtattgtgcagtgagattttgcatccatcatggatggtggccctacctaggtacactgcaaacgtatcaactaaaaaccaaaacgacaaattagtgatatgcatagaacagtgggagaggaccctgtgtttagctggccaccaaatcctgatctctcctgtgccttttttactttctgtctgcaggtgcaagtctgcaatctccaccataatctgtataatctaatctatcagcagcactggctaagcttgcttgcactgtttgtctttttgctcaaatctagattagatatgtgaaaatggtaggtggtgaaacatatcattccatcaaagataaaatgataaatcaagtccgtttttgaatgtgtttcaatggtcctattgggtttacatctatatgcaatttcagtcctgtctaagactctgaagcagataaccagaaataagctaattgggcgatgacaatgaaaaatatggagtttcaatgaccggataaaccacagttgttatttattatggctaatattcacattatctcgtagtattattaatattcagaatcactgagttaacaaatccttttaatggatggaaatcatcgccatatctcatatcacctatagtattatttgcatctatgcctcggtgctactagaacgtacctggaactagctcaatagccacttataaaaaataccaccattaaactaggagattcaagcatatatgctggttcattgtcatattttgattggcattctaaaaaagtcagcgaaaatgcgctaattatcactgtccatgtcacatataaattgcgcaacttgcatattagggaaggggattgctggcccagttcttgtggaggggaatacgtttggatatttggagggccctgaactgcacttatgcatgatcctcaccagccaccatgatcagcctattcagattgggattctcaggcctgagctgacctcaatgaaaccctattttggcacattcctattagttgtttgggttgacctcttacaggtgtcagctcactctccttattgtcattgtcatccattttcctctgatgaattaagatgtacggacatcattgcacatgtataaatcctagaaccatttgaacctgtgtgttgaaatgctttgcttatttgatgagagtaattacactttgttcaagaatagcacactttgtttcactttgcaccatgatatgtccaaattaaaccgactgtgcatgcagcaggtagtgtcgtgaaattttagtgaaaccttgtgaaacatgatcaaaaccttatgacgcccgtgaattttgaccatatttcgcagggttccatttaggtttcatgatgcaccctaatgcataatgaaatttatttcgatttaccttgatgcgaaatgaaagcacattctaaattcggtgcgaaatgagataagtttcaatttacttgttcaataaacagttcactcttttatttattaattagagatgatctgcatgatatatataattgcttaaatgacatccaactttcaacagtttcttttgtttctcggtaccatcataaatacctaacctaattaaattcctattaaaaacacatccgtacgtgtaatggtggcaactagatttctgatgtgttacatctctggtgcttccggaagatgattgtttccttaatccgaccaagatttgcaccggtgtttgggtcaatcataaatcccaaaactgaaaacacctgaacttgcagcgtgtcaaattaaattttcagaaaatgaagcttgtcatgtgcttgttctgagataatgacagatgtcgcccaaggcaacatcatgaacacaaacatactcattcaaagtttcaaaccatgaatatgctgatttgcatggctatcatgccaactttctcgttatgtttagaagcattttaaaaaggtcaggagtgtactccagattccagataccacacgcaaacatcaccaaaatgtttaaaagatttaagagccaaaaaccaaaaaccaaaagaggaacacatcatgaatcactcagaatgtcacataggcaagacaaaccagtcacgaaccatggcgcttgtagtagcagtagtagtgacctacacgtacatccaagatgcatcacgcgtactctatacagtgatgtactatacagcatcacaacctacatacgtatacgatcacgtaccctaccaaaccgtacacaaatacatatgctccatgtatatataattatatatacgtgcttaattaattaacctctcctagtaattaagttacttaattaatctactgtggctacgcgtagatggcgtagcgcatgctctcccgcaccatgaggtggctgacctcgtcggcgcgcggccgccacccgctggccgcccacgcctcctccgtcgcgccggcgccgccgtcctcgccgtcgaagcggatggtgcacgccagcgccagcagcgccctggcaagcgcggcgcccacgctcgccatcggcaccaccgccaccgccgccgcgtcgccgccgccacctgcaggcgcggcggcgtcgccaccatccgccgccgcgagcgcgctctcgtccaccacccgcgccgtcctcctccgccgccgccgccgccaccgcagcccctgccggacgagcgacgccacgctccacatggccagctagctagccggccggcttcaactccaaccaaagaaactgagcttcagctaggcgcgcgcacacacgcacacaacgtgttcgatcttttgcttctctcacgacgagactccggcggcggcggcgacacggcagccggcgcacatcctcgccgtgcacggagacgcatgcacacacaggatcggaggaggagcaggcaatcacacggctcgcgccacgaccacctcccggcagcagcaacctctcaccgccatcatcatcttgggttggcttctcactcctctttgccgcatccaccacgacatcgatcgatcgatcacttgtagctgacgaggctaatcgatcagctagctaacctaggacacatgggatggaaggaagcacacatggggggcgtgtatataagcagggaagtgagggaacagagctgatcgagctagctagctagattagtgatggatggaaacgagctagctaggtagaagaagaggggtagtagtggtggtggtggtggtgttggtggtggggagaggggagcaccgagcactggggctctgtgataaaaaggttggcgtgcacgtagtagtaccagctagtggagaggggattctggccgcagtagcttctaaatttagctttagaagttgtgtctagagtggatttgtggagcaatctaaatctagctccatctctttacattttgtgagagtgctctacccagttctgtttctattttagatggaactgaaactgtttaactgggcttcagctccagggaaggtggatgtggagctagagctggagctggagctggcactgtgccaaacagacccatagtaccatttatttgtttgcgtattatctgaatagttaaaaaaaaggtaataatactgattaatttttagttataccactttaagttaaagttcaatttctccaacaaatattaaaaaacaagaccataggtagtgaacgtcgtatatttatagtccaatattaatctatgttttttttaaaaaaatatttttttcaataatatgtaaatagcaagaagacgttttcttgaaagtttagaatcgttttccctacatgtgtggtggtggtgtggctagctagcgtttctttcttcttgcaccgtgtgatggggacaatatcgggggagacgtacgcggactgaccggccagaaacctttacctgtgtcgaattaacgctccagatgattctttaatgtgcatataatctttgttaggtagtattgtttccttacgtcatactctctccctgtagtttaatttgcatcggtatcgttttcgacatacagttccgatcattgatttgtattattgtattactgataaagaaatacattgtttgttgatgtagttttttttaaaacaaatcaaaataatacctcttttttaatcctcctgacgccacatcgtagccagaaacagtgctagctgatacatatgaataaaattcttgacgagttatcgtttctgtttttcataaaaacaaaacccataatcctttttgcaggtcttattcatgtgaatcagcgggctgcgttaatttctggcctaggatgcagtgtcaaaaggatcaagatattatgcttattggagccatattcttaaagtttatcatcaaggattatttttactaactacggattgtggactactcatacgtttcatgcttaatgtgctttttcttagcacatcatgcttaatgtgtttctttttttagataatgatgcttaatgtgtttcttagtacacgctttgcttattgaatctcataggaggtttctctcttgttgagctttgttcgctattctataggagttctttaattttccccttattgagactttttttaactcgaattttatgactatgtgtagaggatagtgagtaatcttcttctttatataaaataaaaactaaaatgtataatctcattgtttggattgcattcaaatgcttttttagatgtttgaatccaaatacccctccgtacgttttaagttacttgtagttctagctttctctaaaataaccatgtctatctttaactaagaatttctaaaaaactgtatagtttaacaacatgtaataaactatatattgtaaaaatatttcttaaggtgaatataaaaaatatacatcttataatgatgaattacatagatttttaaaaattgatagccaaagatacgaatgtttggcttaagacaaacataggatgtctaagtaattttaaaatcttgcatatttcttatagacctgtcaccatcctttacacatgcaattcgtgacgtttgccataacaatagtgttgtaccaaacactgacatgtaggcccaatgtgttatgggatctatatgtcaatgcctcgtatatatgataactatcgtacgttagaggattcacactttcacacatgtgtacatttgttaaacacacaccctcactcacatacgtatgtacagctctaaaattgacggacattgatacccatatggcaaaccagccttaagtccatccatccttattgcaggttgatatcaaagtttttattgcgtcattagtcactatgtacatggactatatttgtttataaaaaataacacggcttgatattcgatatgtccatttttcatctaccggggtttctggtttctcaatataatagggggcacacaaccatccgttgcactactgattgaggccactagagattagcaacatcacaagtagggctttacgtgggctgacccactaacccattgtgggtaaccttttggtcaatccacttaattagcttataagtagatttgtggattgatccacttaaactgctaatcacgaaacacgattttattccaagctaaagagatcatgtattcatgtcaagcctgactcgttgtcgattcgttgatgtctggggcatcaccatctcgtgttgactcatgaaaaagaaaggaccggtttgccctgttttgtcatcgatcctctaacattttctgttcaagctaggatctctattttctagtccacgccaacctgagcccagatcatttgcaagcttattgcagatattttcttctatgtgtatcagctaagctagttaattagtatgagcaagctgagcgacctgcaatagtaactgcaccaagctagtaggagcaaacccctcccacttcctcgttgttgttggcaaccggccagcatcttggtgggcacaggatgcatgacgatgcagaccaccatgacagttgagcaagggatcgacagtcacaaagtttcttgcctatgccatggtttctgatttacttctccatactattatattgttactgaagacgatacaatcgtacaacaaccctagcttctttaggaattgatagtggtactatgtaggggtgaaaacggccatggaaattcccaatcgaccgagcgccattttcatataagaggtaccgttttcgaccataccattattggttatctatgaattttgttttttctaattctttctgcatcgtattaatgtcgacactgagtagtttaaatgctaaatatggtcaattaccgaccgatctagcgtcgtttccgaagagatgttaccgattccgaccattttcacctctagtactatgctccttgtgacattacaatgagagttgcatcgtgtatttaccaaccatttttgtacatactctatagtaagacgatctcatcaccttcacatactttcaccgcttgaaaactctgtacaaatgggctaaccaagaaaactctctgcagttgaagtatgcagagaatagaccaccttaacatgagtgtttggaaatatcttcaagtgcatgcatataggatgcaaactcatcctgttgttgtggaagagctgttcaagctagagacgtccaacacaggaagtgatgtttgcctcttacatgaaaatttcgagaagtttcccggagatcatggtgtagatctattcggctacgatacgatgagatttcggtcttgacccaaccgttgtcgtcatggtgaaggccgctgtctcaatgtcaacatgcatttgctttgatgcctgcaagactgaaccatgttgataaacacttggggggagatgttaccatccaccttgtgtgcatggtttgctctgctggacatcacattatcacaaggctatttggttttactgcagctcccgcgaggtgctgagcagaagagccacagaggtcaatgcattggctcaaccatcattgaaggagagaaaaaaaattctctgagttatacatgtacatttttttattaccatcatacaatttttagtagcactgggcctattcaggtgctccctccttatctaaattcgttgttctagaaggggttacatctccttctaagttgagttttttttttttggaacggagggagtacactttatagccgctttgtcgcagcctccagccagctgttgcttaccgtgcactggtggagaaaccgtttgtagtcccggttggtaacccccctttagtcccggttgtccaaccgggactacgaatccgggactaaagatagctatctttagtcccgggtgaaataaccgggactaaagatcgatctttagtcccggttggtaacaccaacccggactaaagacagctcagccacgtggccggctgagccatcgttaccaaccgggactaaagatcgagctgaccttttttttttttgcatggccctatttgctgcatggttgattatatatatatatatatatatatatatacacatatacatacatacatacatatgttacaatacatatatagtcatatatatatgtgtgtgtgtgtatatgtataaatcatatattatatacacacacatatgtttaattaaagctacttaacattttatgtgcatatatatatatatatgttaccaaaatacatattaatacaaaagcaaatgtgtacatatataaatatataaatatataaatatataaatatataaatatatatatatatatatatatatatatatatatatatatatatatatatatatatatatatatatatatatatatatacatgcatatatagtacaattcatttgctcggtagctatagctacgacttcgacttcgacgccggcgttatgtcagaagaggaaggaccgacgttatgaattattgatccgtcgtagtagaattcaccgtcgggattaaggacttcttcgttgatgaatcccattagttgttcttgaacagccgtgataaaattcttgtgtgggagattatccctcgtgtgaatacgctatcattccaaaaataatgacgtatcaatatatgaaattaataaacaacttaacaaatcgatacgcaatgaacttttgaatggtttatgtatacgtacatcgagctctcgtgttgtgcatatttggtttgataggcagtgggcatactcgcatatgtagtagccgcataagttagttccctgttcctgctttgcacactacatgagaaacgaagagagatttaatacactctttatattaactgtaattagagattcaattcaatataattttggatcatgcatgtactcactggaaagtaaaacctccgtccaagtttttctttccaagtcccgcggaccaattgacggaaccgatcccaagccctacatatgcagttgcaagctatgattaattaattattacctgagatcaacataatagcaatagattccccgcgactttggaatagatggcattatattacttgtctatcagtttgaagaccttgtcaaaaatcttctcctctttattcattgagtcgtacacagtgactctgcatgcatccaagtcgaagaataacaggacccagtggaatctagaatatgcgtgagatgagatatatatgatcgaaaatgtacatgctatatgtatgggaatgaaatttgttcgaacgacaataaaaactcactctgtgttgtacggcagtagtatgtacgtcttgaaatgctgctgcgttaggagatggacgagattgtcctctgtgtctttctcgtacttgtcgatcatttcggagttgattttccgagggtcgatgaacccagtattgtagaccctccgccgtcgggccctttgaatctccattctacaacgatgaaaggaaagtattattgcttacatatatgccaggagctaattattgaacgaaacaaatcgaactcaaagatactcacaaaatccatgcgctcaggagagagacgtcgagggcgtccaactggtacagatcgaagagatctttgaaatggatccagagaacatcgtctccttgcaagaagtcggggtttctgatcctcgccccgaacatctctctaccgttggcgctcatttccatgtaccgttcatggaatttgtacatctgtgtcggtagggactccagctgttcaggtttgacaagtggtttaccgagttcaaacttgtatgccacttccgccttcgggattggtgcggctccaaccaactgatccacagatagaccggtgtctgcaatgaaatctgttatgccaaaatcttcgccggtcaccaacggctcgacctcttggtttggttgttctccaagctgagggactagtttggacttcttgtgataggctctctgaagtgttcggtcatagtccgatatctgtaacgcctccttgtttgttttggacattcccttgaagaagttcttcacgctcgggtcaataggtatcttcttttcaggactccgaggcttgagttgcctcttcacctctcctgccacataagcatcaagctcctcttgactgcaatcgtatggtggctccttgtttttggtggcgtcaactttcgccttcttcgttgcccttgtgcgggcaggcggtggagcttggcgagaccttgtcttgggaggtgcaggcggacacggtggaggcggaggaggcggaggagccggaggagatggtgcagcaggaggtggcggaggagccgaaggagatggtgcagcaggaggtggcggaggagccagaggagatggtgcaggaggagatggcggagccggaggagatggtgcacgaaatgccgcttgtcgcccaggaaggatgatgtaccgcttgcgccatagtatgatggcgtggcttgtgtctcgtagatgcgtctcatcgtcccctcctgggtagtccaactcgaggtcctcgtacgcggcttccaccagctcaacttcgacccttgagtatcctgctggaatcggcctgcagtggtaagtcccggaagggtccgttgggatggccattcccgacgccaccttcacgtgatgagatgttatctattagtaatcaacctaagcagcaaattgtggaatgtacaagtcaaaaatcatcaaactacgagcataccttgattgataagttcttgaagggaatatgcagctcacatggtgtccgctgcgtgatctcatcaacggggcaggaggtttcgtcctgggtttgcatggcgtccatgctctgttatccgacctgccccgttgaggcgcagctgcttcgattgcctgatgggctgaccattgcaggatgaatgtacggctggggatcctgggaccgatgtgcggccatacgttcatccaccttccttgccacctcctcttgcatgcctcgcgtatctgatcgctgaagacaagggagccatcaactgggttaagcgttccaccgtgagcatagtaccagaacttcgatcgatccggccaattagcggtggccggttcgatacccctctcaagcaagctagcctccatctcctcccacttcggcttcgcgacgctatatccgcctgaccccaagtagtgatggtatttcttcttggcggcattttctttgtttctggccatcatcgcttgcccttgttgccctgtcttgtaagcaacgaattcgtcccaatgatcccttagctttgggaatacgtcgaagttcggtgttagtcccttcaggatgcatttcttgtagagatctcccttgaagctctggaactgttctgccattttctttagagtccactgtttcactaagttatccgtacccgcgggtagcgtgaacgtctcgagcattgtggtccacaacatctctttctctgagtccgggacaaagctgtcatcatccccgcgtgcccttgttctgcgccagtacaccgtgctgacaggcacgttgtccctcacaacccaaccgctgtggcgtacaaaattcttggttgcttctgccggtgcactaggtcggccgtcttcgtccacctcagttatgatgtgccgaccctttatcttcttcgcggcacctcgttatccgcgtgccctcttctgtccagcagagggttgacttccactagcctcctccgcatcgttcccctcctcgttcccctccgcatccctctccacgttcccctcctcgttcaagtactggtttggatcctcgttcccctcttcttcgttccagtactagctgcttccctctgcgattgtgtcatatagtatctgttcctcatcgcgatcagccatctgtgcatacaaaaaatatttgttaggtatataggatgtatttgctaaccgtaatattgaaactctgctaatcttatattaaatctcttataatcttatattaaatggctactaatgtcatattaaaattgtaataatcatttatatatgctaagtctaacaatcttatattaaatctctaacaatcttatatttaatctctaataatcttatattagaattgtaatagtcatatatatatgctaagtcttataatcttatattaaatggttactaatgtcatattaaaattgtaataatcatttatatatgctaagtctaacaatcttatattaaatctctaacaatcttatatttaatctctaataatcttatattagaattgtaatagtcatatatatatatatatatgctaagtctaataatcttatattaaatggctactaatctcatattaaaattgtaaaaatcatttatatatgctaagtctaacaatcgtatattaaatctccaacaatcttatatttaatctctaataatcttatattagaattgtaatagtcatatatatatatgctaagtctaataatcttatattaaatggctactaatgtcatattaaaattgtaataaccatttatatatgctaagtctaacaatcgtatattaaatctccaacaatcttatatttaatctctaataatcttatattacaattgtaatagtcatatatatatatatatatatgctaagtctaataatcttatattaaatggctactaatgtcatattaaaattgtaataatcatttatatatgctaagtctaacaatcttatattaaatctctaacaatcacttatttacatcacttggctgcgcgaattccttcgatggctagctaccacttcggcttgaggggcgacgccgacgtcttctctgcaacattaccaggaaaatgtattagtctaaacgggccaagttacatatataatcatatatgtattactagtaaatcgtataagtagaaacgcgttcgttctaacacttttagtacaagtgcattcacgttcgtaagcgtttcgtgcacgttcgttcgcgttttgggatcgtatcgttcacgttcgttcgcgttcgttaacgtttcgttacattcgtccgcgttcgttaacgtttcgtgcatgttcgttcgcgttcgttaacgtttcgttcacgttcgttcgcgttcgttaacatttcgtgcacgttcgttcgcgttcgttaacgtttcgttacgttcgttcgcgttcgttaacgtttcgtaatcgtattgttcacgttcgttaacgtttcattatgttcgtccacgttcgttaacgtttcgtgcatgttcgttcgcgttcgttcaaaggtcgtccacgtatcgttcacgttcttcgcattcggtcacgttcgggcgcgcgcggcagtggcgtgcagtggcggcggcgtcggggcgccgtgggccggcccggcggcgtgtgggcgcggcgtgggggcccgacagcgtgggggcgcggcggcggcatcggggccagcggcgtgcgggcgcggcggcggcgtcggggggcccagcggcgtgcgggcgcggtggcggtgcgcagcggccgcggcgtggcgtagcggcggcgtggcgagctcgaggcggtggcggccgagtggcgtagcggcggcgtggcgacctcgaggcggtggtggtggagtggcgcagtggcgacggccggcgtggtgtcgcagaggcgtgccgtagcggcccggtggcgtggcgagctcgagggggggtggcggcgttcgtggcagtggcgacgtcgtcgtcggcggcggcggccgcgtcgatcgtcggccgtggagagagagagagagagagagagagagagagagatcgagatcgatagagatcgagagagagagagaggcagcagcggctctcaccaagaagtgcggcggcggtgtctgcggcggaggcggtgaggaccatcgagcgacggcgagagacgacggtggtgtcggcgcgggattgccctaggcacggtggcggcgaaggagaagccgagatcgaaaaacggctaagtgttggtggagaagacgagggcgcaaccggaatatatatacccccggatctttagtcccggttggtgagaacaaccgggagtaaagatatctttactcccggttgttgacaacaaccgggactaaagaaaagatctttagtcccggttgttctgatcaatcgggagtaaagatatctttagtcccggttgttctcaccaaccgggactaaagattttttcccgctatttccaaattcttttaaaacccggttagggttaggaaccgggagtaaagataatagcagttctgtcttcaatttcattgcatatgtgtttcaattatttaaattatttatttaaatagtaaataatgcattacaattatttaaattcgaacaattaatgataaaaccttcgaaaaattattgacaattatgagtaaagataatagtaaataatgcattacaattatttaaattcgaacaattaatgataaaacctttgaaaaattattgctgtacgtagtagaatacgtggataatatataataagcacatgaatgatttaaaattgttaaaaattctaattaacatatgtaaatagcacatgcatgatttaaaattaatacaaaatctaatatcatatataactagcatatcatgatattaaattgttaaaaattctaattaacatatgtaaataccacatgcatgatttaaaacatttagaaattctaataatcatatatatgtagcatatggataatttcaatttgattaaaattctaataatcatacataattaacaaaaaatctaataatcatatataactagcatatggatgatttcaatttgataaaaattctaataatcatacctattttacatatgccatacaacaattgattagtatagatattcagtacatccaacatagtttacatcgtgtacagaacaattacggcaatacatcggcggtgacggttgaccggacatactttctcctcactattgttccttccttgtgatcgctacgtgagtaaggggtgttttcatttgataggaggatgctagggtcaattatcaccgtgaaagggggttgcccatcaaactgatcgtaatcctcgtcagtcttgtcctctaccacgtggcgcttcggctcgtcagtcactttgcccttttttcctttgctagacatgtccttgatgtaaaaaactttggttacatcattggtaaggacaaaaggttcgtctgagtatccaaccttgttaaggtcaaccgttgtcatcccactgtcatcaatcgttacgcctccaccagtcaacctaacccattggcaccggaacagagggaccttgagttcatagtcaagttcccatatgtcctcaatggcaccgtaatacgtgccagtcgtaccatcgtgtcccatggcatcgatacgaacaacactgttctggttcgtgctcttcatgtcttgggccctcgtgtagaatgtgtacccattgatttcatatccctggaatgtcgcgatcgagccagatggtcccctcgccaggaaggccagttgttggctactcgtctcgttacccatgagatgttgtcgcagccacgtggagaaagtatcaatgtgatgccttgtaatccatgcatcggactaaccgatatttttggcgcgaactagagccaagtgctctttgatgtagggagccaccaatgaatattgttgcagaaccgtgaaatgggctttacggaataaattgttgtctaccgtcattattgctttccttccgagagtcccctttccccacagtctcccttcatggcgtgattcaggtaccccgattgggtgaatggcttcgataaattctatgcagaattcaatgacctcctctgttccataccccttggtgatgcttgcctctggacgagcacggttacgaacatacttcttcagaacgcccatgtacctctcgaaaggaaacatgttgtgtaggtacacaggaccgagaataccgatctctttgacaaggtgacaaagcagatgcgtcattatattgaaaaatgaaggtggaaatatcaactcaaagctgacaagacattgcaccacatcattctacagggcttctaatctatcaggatcgatgaccttctgcgaaattgcgttcatgaaagcacatagctttgatattgttgcccggacattatctgagaggataccccttattacaactggtagcagctgtgtcatcaacacgtgacagtcatgagactttagatttgtgaacttcttctccatcgtgcttattattcgctttatattcgtggagtatccagacggtaccttgatgctctccaagcattcaaacatactttccttctctgccttgataagagtgtagctagctggactcaagtaatggcttcctttctcctttggttccgagtgaaggtcaccgcgttgttccatatgcttcagatcattacgtgcttccagtgtatctttcgactttccatatacacctaggaagccaagaaggtttacgcaaagattcttagtgaggtgcatcacgtcgattgcgtggcggacgtccaagaattcccaatagggtaactcccaaaatatagagttctttttccacatcgccgcgtgaccatcttcgctctctataggctggctgccaggcccctttccaaacactactttaagatctttaaccatagcaaacactgttttcccgctgcgatgtttaggcttcgtacggtggtccgccttatgttcaaagtgcttgcctttcttccgtaccgggtggtttgctgcaaggaatcgacgatgacccatgtacacaaccttcctacagtgcttaagatacgtactttctgtttcatccatacagtgagtgcaagccttgtaccccttgttagactgcccggataggttgctaagtgcaggccaatcgttgatggttacgaacagcagcgctcgtaggttaaactcctcctgtttgtcctcatcccacacggggacaccttccttcttccaacaacagtttaagatcttcgaccagtggtcttaggtacacatcgatgtcgttaccaggttgtttggggccttgaattataatcggcatcattatgtacttcctcttcatgcatagccacggggggaggttgtaaatacacatcgtaatgggccaagtgctatggctgctgctcatctctccaaaaggattcatgccatcagtagttaaaccaaaccgtatgtttcgtgcgtcatttccaaagtctttaaattttctgtcgatgtttcgccactgcgaaccatcggcggggtgtctcagcatcccgtcctgttgacgctcttcagcgtgccaccgcatcattctagcgttccccttgttcctgaacaaacgccttagccgtggtattatagggaaataccacatcaccttagcaggaattttcttcttcgttagctgcccgtcaacttctcctggatcatctcgtctaatcttgtatcgtagcgctttgcaaacagggcatgcttctaggttctcgtactcctcaccgcgatataggatacaatcattcggacatgcgtgaatcttctgaacttccagtcctagagggcacactatcttcttagcctcgtacgttgtctcgggcaacttgtttccctccggaagaatgttcttgacgagtttcaataaatcgccaaataccttgtcactaacaccatttttttgccttccattgcaagaactccagagtggtatccaactttttgtgcccctgctcgcaacctgggtacaacgacgttgtgtggtcctctaacatcttgtccaatttatgggcccccttttcactttcgcaatcctccttggcgtcctacaacatctgaccaagatcatccgcaacgttgttaccatcagcatccctttcctcctcgcccgtttgattttcttcaaatccagcgtactgagcaaagtccggaatattgtcgtcttccacttcatcttcttccatttcaacaccttgctctccgtgggatgtccaacaattatagcttggcatgaaccccgactcaaacaagtggaaatgaatagtcctggatacagaatactccttctgattcttacacttattgcatggacaacaaataaaactcttttgcctgttagcttcggccactctcaaaaaataatgcacgccgtcaataaactctttggaccgccggccagcgtacatccattgccgatccatctacatgacatgaaaaaaaatcgtacacacataattattcgtacaataatgacagtcatacaataattataaaataattacaaactctttcaacagtcacacaataatgacatatcattattcatacaaatattatgaaatattacaccgaataattatatatttactatttataaagttttaaactaatattaatgtgttgtacttattttaatttttcattttactttgttttctattattcaagattaactttcactatattttccttctcaacttttttataaaaccttctttaccaaataaactaaatttctatatattctttcgtctccacataaattttctctctcatcaactaacaacaaaattttggagacaaaaaagtgtgcaaaacatagctccaaatgtaatatgaaaaaaaaaacattggaggatgaagttgctaaccttttagacacctccgatttgtatataatcaacacaataaaagaaattttgaagcttactcgggctggaggaggaagaagacatatatataggggtgggactttagtcccggttagtgttatgaaccggggctaaatatcgccgggatctttattcccggttggtaacaccaaccaggactaaagttacgatctttagtcccggttggtattattaaccgggactaaagatcccgggggggcctgacaggccctgacagcatttgaaccgggactaaagatgctctttagtcccggttgatgttaccaaccgggactaaagatcaaatatgcccgttaccctttttaatcgggactaaagatcggtttttgttgcaaccgggactattgtagaattagcccgaccgatgaaagatggtttctccacccgtggtgactctggcatgagagatagcggctgtaaagtgccgttaagcaagcaggttatctcgtattcttatgagttctactcgatctgttaaaaaaatgaccaatattcaccggtaaaaaaaaagctttgctaataaatttctcttatttcacttatggctacaaaattatagtcgcaggaaagtaatttctaacctgaatacaacgatattgtatcatcttttgtggcaaaatctgaatagtattggattaacagttagtcacaaaatcaaaattagaccgtcaaaatacatcttatatctctgaacagagtgaggatttgttttttctaaaaaaatctcgtaagtataatatttcacaattgatgtctcgtaaaatgtattattagcaactataaaaccaatattatgtggaaccacattacaataggaatcttattatggtatacttcttatacactaaatgtactggatgcatgttaagttctataaagtttgattttcaaaaaataccttataattaataatcaatggagggattcagccatgcatgacataataccagattgcaattatgcggtttaacaacaggacacatggtggaactccccaaaactcaccatcgttaataatatggttacgcccaatttaccccattcagctataaaaaaaagtatgatttacccccttaaactataataccggacaattaacattcctgaactaataaatccagatgaattacccccttagaacaaaacaaaatgattttgatactgcgtgacaaacacatggcactaagtttgatgacatggcaatccattagtccacatagaaacattgacaaacaaaatagaacaaacaggatggcccaatatgctagcctctatttattttcttctctagatctcgctctctctttggatccactatctctctccttggatctagagtccatacgacaggaaggggaataagttaagaggcagcaagacggaattgcacgtgagtcgggcccaccctagccggatactccatgccatcgtcatccttatcaatctcactccattgtcgattagaacctggtggcaaccgaggatggtgtcctcaggggcagtgtggctggcagacggaggccgtcggtggccatgtggggagcaccactagaggcagagggaatggaggggcatgagaggcaaggcatactatagtatggtgtcaaagtaggaggggtagggggctgactcttcgtgtggttccccaatcgactagattcggtctggctgaagtgcctacaccgctatccaattcctcttgacatcccttctccaagcagcggcgcgagtgtctatcccacgtcaaagctcgatgaggtgttgacatgtcctcttcaactagggagtcgagttagctgccatgaccggtgcccaaccttgccgtgagtagtcactcatggaggcagtggcctcgctggcgtatctccatctcgagctcacggacgaggcaacagagctcgaggagatggtgagctcgctacgaaattgacgaatggtgagctgcggcgagaagaatgggggagagagcgaggaggaaaaaaagagaggagtccaaataattgtttatcacttttattttattttttgagttgactgccacgccacgtagacaccacggtggagtgccacgttgaatggcccatgccaaaaccgtctgacaaagggcttagggggaatggtcatgtgttttgattcaaaagttaaggggcatgatcttgtttggtattgtagataaaggggtaattcatacttttgtaatagttaagacaataaattcgacttaacccgtaataatagggtcactagttaatacatgcaagtttaattgactagcatgcctagtcaatgcagccaaacaggacaatgagaacagtatatcccagacggcactcgttgtttgattaattctacagaagaaaaaacagatgcacacaaaaaggtgaaaacactttggcaacatgaatgagaaaggctggaacttttcttttttaaaacagagggattaatgcatgcatggaacatttaatctctaccactagctaacaccaacacgacaaacctccagttccttttgataaacgttattcaactaaggattgtaataagagatcaggatggagatgcattcccacaaactagctagagaatgcatgccctagatggaacaaacatggcagcatgaccagtaacccaaacccaactggctagaaagctctagtcaaaaatggaaacctagtaaagtaattagtgaggcagggcatgcctaacgcactaactgtaatggaccatacaagcttaattatgtgatcatccactacctaaagcaaacaccaatatactataattaatactcctccatgttgatgtaaaacattaaggagagaatatgcatgcactagacagttcctctctgatcgattcacttgtagtacaatcaatgaagcaagtaaatggtcaattggtgtgcaagttactgtcaatcctgagtccttgtgaagtttgtgatgtctatcctaactttgattgtgaaatccttttttttatgctcttttgtttgtctctttccctcttctactttagtttgttttgtggctatgatcgaatgtaacacacaacatgcagttttggccccccggattagttgagaagagttgttgtcttattcttcttttatctttttttttccttcttctttctcctctactgtctatgatgccatttggttgtggagtgtgggcccatggaacattttccctatcaaaagggctgattgagtatttcagagctttcatcagaacaacccagggtactagtagctcctatcagtgctcacgtacgtggtgtacgtacatgggtgcgcgtgtgggcaatgcatttaggtttttacatgctttgtagagtaaactggacctaaatacaatttagtactccctccgtctagattcattagcatcaatatgaatgtgggaaatgctagaatgacttacattatgaaacggagggagtacctatattatatacatattttttttaaaaaagaaagcataagaagtttttgagaaaattctatcacaaacccataatctgaattcccgatcaaacccaaggtggaatatcacataaaaacagtatttatggatttttttaccccatactatctagttttgtatatctgaactttttttttgggtggggattcataatttgaataagttgaagtttttgttgatagtttttacactgacactgtaataactttttgaaattacctcgaagtaaaatcttcattcataaatgataagaaacatatacaaacaaatcacacaaatctgaaattcagagtgcacgccacatcctcccgttcgtgtcgttcgctggggcgacctagatgacactcaacaagcgtcggcgctgccccctccttcacatcctctgccttgctgcctcctgagtgactcactagaaagccatacaaccataaggaagacgacatcatggctatttccctctatcctctggtggcgctgcctagatctgatgctcattgtcaatgggaggcgaatgcatggtagagacgatcatgtcaggtttgaaggtggcgaccatgggtaagcatcgtggtagccaaggcggtggtggaagccacatccaggccaccacagcaggatccaacgtcggtaaggcccgtagctgagactgaacccactggaatgagctgggtagttagcttgtgtggtggaggtggtcacactgtttagaggtggtgaccatgagtactgctgagaatgatagtgacgagcttgcaggagtgaccgacgatgaatggaacctttggcactggtgccccatggcctaatgtggtgctcccttagacaactctgacatctctctggtaggagagaagctttgcaacgacaacaatgatcatgtgttgaggcaacggctgtgtggtagcccgatgcatctatggcggccactagtgacgacccaagggggagccattgaggccttcaacggcgatggagtgacgaccttatgtgacgctggagtacgaggtgtggaggctggctgacggtgggggtgtcagtgaacaatgactatgtgctaatagtagtttagatggttgtggggtcattggagctgaagctgtaggggtgggtaggcaggcaataggtgaaagcttagcttgaaagcgttttgggcaggcaatggcgacattttcttgtgctgaaatccctcttgagggcgttgttagagtgtggctttctttcccccagcaagaagaatctccgggttttaattgtgccaaaatccctagacaagtggcattgacgactatggcatcatgttctctttggagatcctgctatttcattttccgctgttagataattgaggcggtgcttttggatgcatgacagggtttatgcgagggacgagtggaccgtttttctccctcgacctctctgtttgcaactctcaattctggtggtgtctagaaaaccgtgggtgtttcagttgtttgaagacagtaggtagtaggtagtatagtcggagttttttttggtccgatagcatccgatcagacatagtggcggccctatggtgatactctctccgtctcaaaatgtaagcatttttttagctatgacctagattcatagcctaaagttgctatattttggaacggaggtagtagttcttttcttgactgtgtacgcgggcgctaccaatatgtgttatgtgttggtgtgtctattttcaattttcctaattatggtcttgcatgactgtagtcttcttttttcggatttgctataattgtgtcgacagattttttcgttaattacagtcggttctctggccgttggatctgtgtttaagatccgtgcttccatactgactttttcctcgcaaagagacctgaaagcatatgctattgctagctaatctctaaagtcatgcaaatccaagtgaagcgtcacctaatttcgtgctatatgtatgcatccttttctttaatacaaattttttacaccccgcttacatcccacttacacatgtaattactatgtaattttgagacttacatatgtaattataaaacttacattataaatacactaaatttacatatgtaatttagagacttacaatgtaaatatacgctgactatttttgggttaaaaatatggcgtcataaatatagctacaccctcttttttttataccatatcaatataaaaccactctcgtgtttgttcatttctttttaaaaaatcataactaaaaccattatagctagatttttctagactcccatggaaaatggactattttccaacaattaactaaacaattagattgcaactaaactgctgttccaatgcggtctgaacatctgaggtcacatcgaaacgcaggtcacgtctcaggttttctttatgcataatcctcactccaatctccgaacatatattcagataagtacaatgcaccatgcttctcctataattgccgttttaatccggtcgctcttactagtattaaatttgttttagtccgattgatccagttggccccgtggccggcatcgtgaatgcatctatctctttcgttgtctcctcctgctctcgatccatctaattcgatcaccccagctcgatcgatatgattccacttatccacgagattagacacagtccaatgaggtttacttcacacctaattaatctagtctaatctaatctaatctaaaaaaaggcaaagctttctctttgctggaacaaatcaatcaataaactagtgggctcatcgggtttctgttcttgacacgtatcgagccgccatgaaagctcagctcgcgagcttcagtttgccatacacggcagcgtcgttctcgaaggatgctagctgctgctgctgctgctgctgctgctgctggatcagctgcaattatcacctgctggctgctgtgtccgattccttgggttgatatcaattgttgctgctaattgcgctgtttgattctgggcatgcgcgtatgatgatgcggagatggagttgtaggggatggggatcagatttgtttcgctggtttgatcttgctttcgattattaatttgatgtgaacctttttaggctggattgttaggcatagttctcttctagatgtgtgtacactgtacagtaaacaactcaagattttttttttctgaaattaaaataaacaactcaagattcagtctagtgtaatgatggtataggaattcagtcaatctaggggcagatttattttatgttttatatatcaaatgagctgcatctttaggaccaaaatatactgtaacttcgagttctgatttctatggatagcgcgtggtccaaaatggcatgtgaaaaaaatgcaatgtagcaatgtccgaaccgagacgtgtgagccttttgcacgatcctaaaaaaaacaattgcacggagtcattgtaagcgaaacgacatatttgtaaacgaaaagtaatttgcgaataaaatttttatatacgcgttcttagtgataagtaaaggctgaaaaataaacttcgataagaaaacctcaaaatcagctctaaatttaaggttgaaaattcaaattttagctgataagtataagtataagcgaaaagatagaaacataaccctttggaaaaaaaatgtaggtgagcaatatctgaagaagtatacggatgaatagatgatatattattttattttgtaataatattcgaggttacaagcgaatgaatcatctacttttagttgtttaaataccgtttttaagcattgtatacagaaagtttttcacagatcataccgtttaaaagtatctatagtccataagaggaaaagaattggatctatttctctgcctctgacacattgcacgtagatcttcagtcattctctgaattttgctgatgactggcttctcaatcggttatggctgatgaatccagcgtttccaagctttccatctccagtcgcatctcgaacccaaagcttcggtgccaaaaagaaaaataaaatccaaagcttctcctataccgtgctgatgcactcaagaatgcgaatgcaaaacactgtgtaaactccaccaaagcagttggtgattcagcatgggccttctgtttttcttgacaagcacaggccttctagacttctggtcggccttatagggtcggcctggttgccatcctagagtgatcttcgttcttcttcctcctggcctcttcttcttctctctcggaccctccctcttacatcttctcaagctcgtcaattctattaggaataagttcatttgagatccattaacttgataacgaatttgattttcatccttaaaccggaaaaataaatacaaacagatccctagttaaactctcaaaataggtgcaatgtaagtcccaaggtagtatagcggatggttttgtccgacgtgaaagtttgactcgggtcaacaccgctgagtcagtgtggggcccaccatcaattaagttcactctctcccctctctttctatctctctctccagacctccatcttggcaactggcgggagaggcagccggcatcaagcagcgcgtactggtaggagaggctcgtagcggtcggtggaagaggatggtgggagaggcgtgcggcggctaggggcatggcagcggcgagcgtggtgagaggtgcgcgacgggtggcgaaaagcggggagaaggaagaagggtcgtgggcagcgagggaggctcggggcggccccttcctctttccctcgccgttgcagctgcgcaattccatcgggccttcaagaatctcttgcatgaccctcttaagcgctcattcatccataagaatcctcatatgggtagcgttctcgatcttgatcgacttgaattggcccttctgccccggctgtcgacacatctcctcgtcgaacgctaacatggtaaccagattaacgatcccatctccatcaccgtacactctttctggagcctcatcgaagttaccgtctcagtacaccaactgtcgtggcgtcctcttccccactctgttgatgtacgtcaacggcactatgggcgcctcaaggtagttcatcctcgcaaccattcgtctcctgaaaataaggatgcaagtgggtagtcccgctacccgtataaaaatccgtttgctatatttcctgcatggtagtaaaaaatataagatttgattttcagatgtcctaggaaggataaatagaaggtgtggcaagccagacaagtaagtaaaggaaaaaaaataaaggcatgtcaagaaagaaaggagtgataggtgatgcgacttttaaaacttataaaattaaaaaagtttaatttttataatcgtaacataatgtgatgactatttaataaatcttttttaaaaaattatgtgtaaaaagttcagataattttgtacgggtgttagtcatgcaattgcacgggttcacttagctagttagattaacttattctaatataaaataatgataaatattttaaaagtttaaccatgttgtaaacgttcaacattaatttatgatgctcaccagtcttggtttccgtacaactgggcacctaattgtgggtttgcatgcagttggtaggatttgcggctgagcatgatcggcttgctatcgtcgtccccgtaattgagaaatgaaaactaacgttggaaatggtagcgccggtcgctgccctacgtataataagtgagaaaagtactacatatcacctgcagttcatctgcaacaccaggactgaattagttgctaaggctgtgtttagatccaaatttggatccaaacttcagtccttttccatcacatcaacctgtcatacacacacaattttccagtcacattatctttaattttaaccaaaatccaaacttccccctcaactaaacacagcctaaatcacccgtaattgagaatgatcggtttctaattaaatcattggtgtcaagttcggttccattttaagaaaccaacattttttttacctgaattagtcagtcggttgctaaattgttggtactaattaaattggccggtgcttacatttatggctatttattttttagtggtggacgatatattcatcgacaacgagactcctacagtaattttgtgaatctgaaattatatcggtccagttttcgaaggtgtccataggggtagagatattggttattgttacattcaagtctgcttaagttttaggtttgttcagatttactgatatttctaacacaactgactttcgagggtgttttctcttgaaccattgattagtttgcaaatccgttctttggagttgttcctagcctcctaggtctatctagtttattttgctcaatccaccggttggttttggagacaacgtgtttttaccatagctttgtcagattgttttttaggtaggctggtcagagttgagtaacctatggtcggaccggccgggcctcggtcagaccgaccctagtaggtctgatagactgtcagatgtgtgttcaattggtttttgaggttgaggtatgatttgatcttttaaagtttgataatttgactttcgttgatgttatgtaccatttacccccttcgataggttttattcttcgtgtacaatcctataacacatccgagaaccaccgtatatatgcttgtaattaaatgacttcgaacagaagtttatagccacaagagcctacgaagaattccaattcacttcaagaagatctcttgcatgaccctccttagtgcccattcatccgtaagaattgaaccatgagaagcattattgagcttgatcgacttgaatcgccccttctgtccgggctgccgacgcatttcctcgtcgaacgccaacatgctaaccaggttgatggaatcatctccgtcaccatacactatttctgtcggttcatcgtcgaagttaccatcccagtatacgaattgccgtggtgtcctcttccccactgcattgatgcacgtcagcggcaccatgggcgcctcgatgtagttcatccgtgcgatcgtccgtctcctgaaaggctcgatgccatcgctgaaaccaatggcggcgaggagatcttccagatcgtacgcggagtagttcctccgcttagtgaccacgatcggctcgtgcccaaacaccccgggagatggaacattgacaatgctcgtctcgaagctcctccacattggcctcagagacaaggccgtcgtgttcgcgacgtggaggagatctttcggcccggagacgaggttcctcacggtgggcacgaaccccgtggagagcgtaggtgcgacgaggaagagatgctcaatgtacttgtctcgccacgccgacggtgtgttcctgacgaactctagcgccaccattccaccgaggctatgcccgaggatgatggccttcttgttgtgatgctgcttctcgcttgctgtctccacgagctccatgaactccctgaagtggcgcgagtagacttgggacgcctggccagggattggaggagcgtaacggatatcgtaaggaactccgtacatgttgtctccgtcacggtatcccatctcctccagcgcccctataagactcgcaaggcaccattctctgcacgcagatcagagaattaattaatatagtgagaacagcattagcgtacgtaggcaggattgtttttaataactggaaggtgacccgcgcgcatgcgcgggcacttatgttattgaaatgcaagatttttattatttgtttaaaaattttgtctcatatattaatggcaaactaaagttcggatactgttattttgtaataatttaagagttctatttttcttaaggtatcttaaaaatccattcacaaacttttgagtaggagatggattaaatacttacgacatttgaattatgtttttttctcgagtaaataataaactattgcttgaagtatggctacaaatgaaaaatgtaagagcaagataatcaaaattcttgtgattaaatcgtctcatttaggtgcatgatattgtaagaaagggagggaagcgtatacatggagaaaaagaagaaaggaaaaaatgaaaaaaaaagggaggggaagcataggtacccacgtacgtaggtgtgtaaggtggagaggtgggacctcgtagtatctagtttcttctaagatcaatttaatctaatggtttataatattggactcaccgatttaagtgaaaatcaagtaatagatactttgcttttttttttcttagaatttataatattttctctaatttattagagcaccacgtgatagcttgagggtattttaagaaattttaatggacttaactaattagaatatgaaccgtgtaatatatatgtatgtgatatatgttaatattcattctagctttgtccatatttatatacatgtagagagaaattaaatatattgctagcaagccattagatgtataattaatagaaattaattttgacacctatttacaattattcatagcagctcttacagattcatgttacgactttgattatgcgttgatcaccaatttactgatcaccatgactcgcatgaaaaatatatgtagtacttagggtttaggacaactgaaattgatgagttatctgatttatgtgatagctatttgagattataaacgaataaattaacttctaaaaagttaaaaggttgtttaagaaaatcaccatttaggaacttggaaagcgtggagcgtgcaaacgaaaatccaaaagaatagagccttaaactcccttataacactcttgtcctattaggaattctattaatatgcgttaatattgtactcaaatttatatcataatgatttctttcaactgtacgaacaaataatacaatatccaaatacaacataacacaatacattataattattatgtaatcatctctcgatttcagcttaaacagagctaagtgttcctatagtgcttaattcttctctcgctgcaacgcacctttaattttattttcatgttattgacaaaagcggtagcgttgcagcggtcgtgatcacctaagatgcctcagacacgatgctttgtcgcacgtgcgaaaggcaaaggtgcagatgtgtttgtgtagcggaccaaaaagagaactttggacactttagttattaacaatagatctgttgatttaaataatgggtccaccagttgtagtgtaaatataaattagttatatatatatatatatatttaaattgttaatttaatgggtacacgatatgatggtgtagattttattttaaaacaatgcattatttgagaataatagtccaaagtaataaaaaatatatccgatgatttaaataatgggtccatttgtttaagtacacgtataaattagttaatatagatcttaaattgtttatttgatatgtacacaatataattgtgtaaaatttattttaaaatagtgtattatttgaaaataatagtacaaagtaacgagtacaccggtttaagtggaaaatatattgatttaatgggtaaacatataatggtgtaaattttattttcaaagattgtagagctaatttagttacctgtgtttataaagaattatatgatggtatattctttgtttgtaaaattatgtttatttagaaaatatatatcaattgtataaatggaaaaaggaagaaaaaaagtaaaaaaaaattggagggaatcgtacgtactacatacccatgtacatatgtgacctaggtgggattcatcgtatttagtttgtttttagatcaatttcatttaacggtgtataatattggacccaccaatttaagtaaaaatcaagggtagatgttttgcttttttttagaatttataggattttctctaatttattagagtgccatgtggcagcttgagagtatttataggaagtttaatggacttttagtatataataatagaagatggatagatagataatagatttctgtagacaaatagtacatcatctgtagtttggtggtcttccattccatgtcttaaatttgtaatcctttgataagtttgatcgtaaatattttgtcctgtgataatttcgtcaaacatggcgtatcacaaaactgccataaaactagtatactttgacagaactatattatatataaaactacatatttagaatcatatttatcaaagaactataaacttagtaataaaattatcacaaaacatgtatatattacgggtgtgtagggttcttcgagcggaaccctctcgcaatgccgaagttggccacgtgggtcctagacgaggctcatctgctcctcgaagcactcgctgtagtggtgcgtcgagaggtccgagctgttctcccacagcccgaaccaacccttccccttcaacgcgccgcgccgcacctcgccaccgacggccggtatatatgcgtcggtgagccacgcccccaggttgctgcagctagccccaggcacaacgaaaatcgggtggagctcgccgacgccgacatcgtttggccggtggtggcttggccagaagtgctctcgaagggggagagggagcagcagccgcaggagtggaatggatgccatgggggtgtgggtggagagtgtctctctaggtttgatggcttgaattaatgcagtgcttatagagggagtttagcaaaatataacgtggcacgacatatacagtcattaatccctcttatgaaaattatttgatgtttaaaataaaattagatcaatatcttttaattccatcatcattggcgacgggtgatgcggggtctgcggtggctgggctggggaggcggcggcggtggagcgacggcggccagactggaatatatgtgaacttttttttcaaggatttgtgatgagtttgtttctgagaatttttgatgtattcactatgtgtgtgtgatgtgaatatgtgatgtatttgtgatgttttttttttagaatttgtgatgtatttagagatgatggatttggggatttggagatgatccaattttgttttgtgatgatagatttggggatgctgtgaaaaaaaaaaaacaaacctgccctggctccactctatctttaggcccggttgataacatcaatcgggactaaaattggatttttaatcccggttatttcaaccgggactaaaagtagctttagtcctggatccttagtcccggctgcataactgggactaaggctgcgttcttttcagattctccccaccctcaacagtgttcacggaaaacggagcgatccattagcacataattaattaagtatctgctaatttttttttcaaaaatggactaatatgattttttaagcaactttcgtatagaaactttttgcagaaaaatgcaccgtttagtagtttgaaaagcgtgctaacggaaaacgaggagaatctaatcctactagcctgaaaagaacgcagcctaagggggttactgtaacgccccgattttcgttcgggattaaaaatcattaaataatgcattttctagaaattaaataaaatttaaagcaatttaatcaagtgaattattgagggaattaaaaatttcctttaaaaatcattggccgagaatattttgtaatattctttgtgctctaaaatactctccggaatttcccgcgaatttttggagctcgagaaataatttgaatagcacaaagatcaattaatcaattaattaaaaagaaaaacaaataaaattccctcttctccctttgggccgtttcggcccaaagttttccttctctccccgcggcccgtccccttcctccatcccccccatccggccaggtcggcctccttttcctcctcggcccggtcggccctctctctcaaagtctgcttcccccccccaaccggtctcctctcttcctctggctgacaggtgggacccgcggccccacctgtcatctccttcctccagccactccgccggcaaccgccattgccgcccgcgccgcccacgtcgccgcctctcccgcgcggccccttttcccgcgcgtgcgtgggcgcggtctccgcccacgtccgcgccattcttcccccactccctgtgaaaaccgccgccaccccgagcccactcacccacgtcgccggcgcccctttcccccttcaaatccgccgccaaccggcctccccgtcgactctcgaggctataaaaacgatccccgtgctctcctctcccatttccccaaatttcccgagctcgccgcgtccttgcccgctctcccctcgccaagccgagccgccgccgctcgccggagttcaccggccgccttttcccgctgctccacccactgccgcaccaatccgccaccaccgttggcttcgcggcgccgtgctgcagcacggcccctactccatttcccctctctgcctccggaacatcgccgcctcgcgcaccacctctctcctccgccgccgtcgcctccagcagctcaccaccgccttcctagccactgccgcgagacgccgctgccgccactagtttcaccacgccatgctgtaccccggcatccacttttcctccccaaaccgccaccgaaattcccattccaccgccaacccgagccaccacctctactcgccgcctcggccaccacttcccgtcgccggagcgccgtctcgcctccatctcggggagcccgccgccgacggccgtcggccgtcgccatgccccatggtggccacccctcgtcggcgccaactcggtgagcaccctcctccctccttctcgccctccttcgcccgctccccgcgccgcccgccggtcgccgtcgctggtggccgcgcgcgccgtcgctcccaggctcggccgagccggctcctcgtcacgcccgtgctttggccgcccgtggaccactcccgtggtccgggtccacggtgccgcccaggccgcggtggaccgagtccaccgtgcgccctccccttgtgccattgacgtgcggggcccacctgtcggcgcgccccttccccttgatgacgtcagccgtccctcgtctagaaattcatttaaatggctcaaaacttctagaattcatacctaattcattcgaactccgaattgagccgttcaacttgcaaaattcatctaaaattgagctctacatgtttgtttactttttatgtactgtttccttggtttttattagagtttttcctcgttttgcgtgccaacgtgtagtttcgtcgtttcggaagtccgcggtcgctaggaaaagagttcggaagattgtttgaagaagcaaggcaagtcacacatttcccttgagcatgttgatcccaatttactaatgttttaccgtttacaaataaatatgcatgttttgctaattacattggatccgggtattacctatctgcttgcttgtgccatgtttacttgatatctgttctttgttaaccttgggtaatgaatcgactagctcatgttacttatgtgacctagctagaactatatgcttagccatgcttaattaccactagctcagttgaagggataattacagtattagacctttttagtatcagaatgagctgcgtgctcgacacatctggccatgcttcatggtcgtaattatccaactaaaatgcgactgaatggtgggctgtgggtgcatggttttgctagtcgcacccatggcaattaaggaccggttcgtgggaaaccttggaagaatttatcgtgcttaccacaagccagcgtgggcaacggctgggcttgtagtgtagctttcctctagctgacgcatccaggcaagggtgggcgtgatggagtttggatgggccctcgacggcctatgcggctttcggattcacctaggcacgagaggggactgcccgctgccttacgaggagtgggggtgaaacctgaggtgtggtgtgcttggttggagggggttatgcgaagggtcctgtcacagcctctttccggtatgtcgtggtggcatgccggcgcacggaaacgtgtcgtggggctgtgtcttgtgggtacagttgtacacctctgatcagagtaaaactattcgaatagccgtgcctgcggttatgggcggtcgaccagattcaccgtgattagtctcacacttaatatatcgacccaatgcactgtagttcaggtgggttggttgggcctattcaacgtggtgtagcgttgatcagtggagatttaatgttactttaattactcaacagttttactgttttctcaataaaatgttttacaaccgcctttatgcaaatagccacaaacccctttctgtatccccttgcacgtctgcatcgttggtgtggcttgctgagtacggtggttgtactcagccttgcaattatttccccttttcagaagtgtagtgcttctgagctgaagacgaagttagaagaccaaggctcagaccccagttgagttttgcctgtggagtggagctgaagccccgctaggatcgcctttttccgctgctgtcgttctgtttcggtgtgaggactaagtgcctctcctgtaagtattttacgctgtatttacgtttagaactatatattacttgtcgttttgtgtaccctggctggttctagacagggatttaatacgcaaaatagtctggaaatttgggctaaatttctagacgtgacagttacaaaccggggttaaaaaccctttctccaccagtgatattcacatagaaaatgatgatcaatattttaaaagtttaaccttgtatacgtctaatatttgtgattgtagggaatttgttattgggactaacaagtatagatttccaaatgagctgttcggctcgagcacaaccgggctcaggtccgatattagttgggacgacacgggacgacctacacgccgggtcggaccgagttcacccatttgctgcaccaacggcgcaggcacggcacaataagactcatgccgtaccggattgacccaaaggcacgaaaacccatcgtgctcttcttgaaaaaagtctttattttacctccctcatttcttttggccgtgtcttatatgctggatcaagtctattttgcatttctcgtctctgtgggcatctcttatatggttagggaataagtctattttgctttatatggcttgaataagtctattattgctccctcgtctattttgcttggtgcagggccgacccatcatgccgaggctgatgcctaggcatggtccaaaggtcgggccgggccaacacaggcccaacaccagtcaaaccgtgccgtgcttgggtcggccatcgggtcctgagctttttgccaactatactaacaagcatatgcttgtccaatcttggtttccatataacttggcaactaattgcggttggtaggatttgtggctgaccatggatctgcttgttatctgttatcctcgtcaagttgataatgatagcactggtcactaccctccttaattgagagaagtgtacatatgtactatatcgtaaacctcacttcaatgtctcattactaggcacatctcagttttaggttggcttaatgagaggcaaattaagatcaattttcgcgatatgaatatttccgacatggcaattaatgggacatatgtgtgtgtgtgtgtgtgtgtgtgtatatatatatatatatatatatatatatatatatatatatatatatatatatatatatatatatatatatatatatatatatatagacacacacatatctatctatctatctgtatctacgctttgtataatttttatctctgatcgactattgataaaaaaaatatataaaccatttgatgatgtgttttataacaatttaaatcatatatgaattgatcatttaaaaacaaaagacacaaggtaatactccctccgtttcatatatgaatagatgttaatgaatctagacatatatagacatatatatatatatatatatatatatatatatatgtttagattcattaacatttatatgaatgtgagcaatgctagaaagtcttataatatgaaatggaggaagtacaaactaatcatcaaaaacaaaactaaggtgatatgattttataatagaagaaatgggggggggggggggagagagagattttagaccctagatcaaccatccaagggataaaaacaattgaggtggtttgacttaacgagagaaaaagaggtaattggggttcggcccagattagcggatgaaaaaaaaaacccagaaatatatcatatattaatacatcttctcatattttttttcaatttttttatacttatttaagtgacatgaaaataaagagtagacagcttaaaatccgttctccatatactacctccgttttttaatagatgacgccattgactttttctcatatgtttgaccattcgtcttattcaaaaattttatgcaaatgtataagatataaatcacacttaaagtactataagtgataaaacaactcataacaaaataaattataattacgtaatgtttttgaataagacaaatggtcaaagatatgagaaaaagtcaacggggagtataatatatgccattttaatcaggtgattcgtggctggtaggagcgaaacttacgggttaaaaacgtccttgctgccaaacgaccgtacggagccgaagttgggcacccgggtgtcgacgccgggcaggttccggtactcgttggcggcggggtcgtagaccagggccatctgctcctggaagcactccgcgtagtcgtgggcctgcagctccgtgttgttctcccacagcccgaaccatcccttccccttcatcgcgccgcagtgcgccgccgacggccggtacgcctcggtgagccgcgcctccacgttgctgcaggtcgccccgggcaccaggaagatcgggtggagctcacccgcatcgtcctgcggcgttggccggaggtggctcggcgcccagaggtggtctcggatcaggggaagcgggagcagcaggagcagcagccgcaggagtactggaatgatagttgccatggatggattattgcctctgcaggtctgatgcctgaacgtctctgtggatctctggttccttgatataatgctgcgtgccgcagagtcgggctacatgcctactccctttcttagtgaaagttatttagatttgattaaatttataaaaaaaagtaatatttataatattaaattagtttcattggatgtaacgttgaatatattctgatgatacgtttattttgtgtttaaatattagtatattttttttataaacttggactaagaaaaaagggtgaatagccaaaggggtccctatcaaattcatagttgtccctatcaaatttatgcttaaataataagaaaaagagaaaaaagattacaaatttatagtttgtacgttgtagaatagctgcacgggtttgaacaagtttttaatacacgatattgttgattttttaacacacatttaatcattcgtcttattaaaaaaatattattatctatttagttttgttgggagttggtttatcaactaagacattttaaacatgacttaaattttcatatatttacataaaatttttgaataagacaaatgatgaaatatacgtaaaaaaagtgaacgacaccatattttaaaagctggaagagtaggtgttagagaggtgtgccaaatattaattgatgatatatttgttatataaatagactactccctccattctttggccctctttgtttaggcttaggtttattggtctagacttttaagtcagcttattggcttatatgatttataagccggtagatttaatgtcctaagtttagtggttgagtcatgcatctacctcatataagccaaaaaagcttctccaacctagcttttggcttaatagtgttagagtggcttatggcttcaaaaaagccaaatggaaaagctgcttgtttgtttaggtttagacttttcaacttataagttggcttatagatgatgccgttgactttttctcacatgttcgaccattcgtcttattcaaaaagtttacgtaattataatttattttgttatgagttgttttatcactcatagtactttaagtgtgatttatatcttatacatttgcataaaatttttgaataagacgaatgatcaaacatataagaaaaagtcaacggcgtcatctattaaaaaatggaggtagtattaaattagctacacatgatgtgttgaattttacatctaatagttttttatactaagaattaaacttgcctgtaaggctgtaaatttcgtgtaacgtgtattacaccacctagcagctttggccatgcacgtcgcaggaccactggctagatgtcacgaagcatgtgctattctatttattatttataaggatagctcgagaaagacactatatttactttaaaggacttaaagttactccctcgtcttgaaaaaaaacaaatctagtactggatgtgacacattgtagtataacgaatatgaacagatgtatatctaaattcgtagtagtatgatgtatcacatttaatactagttggtttttattggacggagggagttctcctgtatctctacaagtgaaaagataatcatgaggtgatcctgggatgaatcacgtcagtgagacttagagcacccgcaatggtaaagtaaggtgctatctataaaacatgtacatctcagcaatagactagattaatagtaaaccatctcaatagtatgtctacatgggtatctatagctctctaatacattgtctcgtttttctctataaactatctccaggttagtagatagctttgctctctctcttcatttaatctctttcaagtaggaaaatatgctgacatggatatcttatagagagcctatagataaccattgtgggtgcccttatgagtaaataatagcagtcagatagagcaacggtaacaaaaaaccaactgttggatatagaatcagtcctggtcacagaagtaaaaaagttctgaacgtggcctggcttctaaacaaatcaacctgaacaaacacgagggaaacgaagttctgaacgtggcctggcttaaacaaagcatcctgatccctcgaaaataaaaaacaaagcgtcctaaacctggacaaacacgaggggaacggacgaggcatctgggatgtgttttgctaatgcccttatagcacaatgaatttgtcccacctaggcaccggcttaatggcagcagctaatcaaattattatctaccttaccttttaagctagagatattaaaataattttcaaaaacaacatagagttatgttaatttcacgtattatcatataataccccatgcatatataatatatgcatatttagtttataatgtgaaaataaagtttacgaaaacatctacaaatctaccgtaatcatgttgaattaaatgtttcgattaaaatattcttcattacaaacaagaagatttaattattttccaaatttaagaaaatcacatccaatagagaagaggttatactcgtgcgtgcggaataattggaatcaaagttctcatttaaattcatagctttatttgacgctaaatgtattcggtaaatgaagatcaaggtaacacgaaggcacaatattttacacaaaagtagaaaacatccatttagtggtatacgatattactcatgtttacaattgtatccattaggaattttgaaataaaaaaataattctttgcttatctgctcacatttaatatacaaaatttatgatctgtatttatagtaaatttgaatttaatacaacataagcatggtcaaattaaaaatgacaacatgtacatggtaaatttgataggacgacatgcacatagtaaattttctacgatataaatttacataaacattgtaaatttagaaaagttgcttggctgttttttcaatattccgtaccttttattctgaattctagtaatttataaattatatttatacttcaattctcatttttattttcctaatttagaaattttcttttttttctaatcttaattaatcttgttttgtgttttacagggattattattttaatattccttattaattttattctgaatttttgttgtttttaaattgtatttctatttgaacttttttctccgattaatacgggaatttctggtctatgtaattatttttaaattgtattatgagttgaactcttattttctttttctcttattaatgtgggaatttttagcctacacaataaacggggtgtctagactgttttaatactacaacagattggtggtcgaatttcaaaaggttaatcaaagcctcattcttagacgtaatattcagaagttatgactaacctatcgtttttttgcaccgaattgtggtaggtggtattcatggctaagcatgatcgacgtgacaagtacttgtacaggagtacaacaagtgtggcggtatccatcctccacttgtacagtgggcagagctagtatatattagggggtgcctagaatctggtcaagaaaattttttagctataactcatctattttcactatgcatacacccctcaatacaaacttagacacccatatcagcttaaactcaatctaaagtagagtaaattaaacaagtgacactatcatctgcttcgctctcctgcttgtacttgtactttggcactgttcatgtacgtactttggcacgtgaggacgcacgcacgagacggcgtttcaaccgccgacaatttccgtgacacgcatcgtgaggcgttgccgtagtgaggagtcctgctcgaactctgatttggggaaaaaaaatcagcttgtgcaagccgtcgtgtgccagtagtttagggtgatattttgttacacgttttgaagaaaaaaacttatgagcagtaatattggaaaattaaaatagaacatcagcttgtgcaaagctttttgaacgatcgtcgatctggtgaataaactgaaaaatatttgtgctgctatttgactacattttttacatctttccactatgcttatttattttatatggcacatgtaagcatgtttattaaatttgtacaaggaacatgtattttatttttattgtgaaccaggaattattatattcaaccccggtaactcttgttgtatttgaatggccacatatttctttttgttgttcaatttaattaattcattcagacacaagccaaacgctttcttccagtaacacgtgggaaaaaaacatagcacgtaatggagatgagactcagttgtaacatgattgtacataaacagataacgataaaagaaataaagacactctaatttaataaataatagatactagtctgattggagatgacatgcgcgtctcaagtgattgtagacaacatcggcaatgcagtcacgcaatgctctcatagcttgctccctatttgttgcgtagtacatatgactgaatgatggatgcttctgtacaatgggattattgttgtacaaaggatgattatgccggtagttcacatcgcgactatccttcctgaaattgtgtagagcaaaagctgcttttatgatgcgtgtgtgaactcggtcgtcgtcgttatgtggtatttctttgaggattttccattgttttttaacgatcccaaatgttgtttcaataacacttcgcaatgagaagtgtcgatggttaaatttctcttcccgtccaactggttgcggtgcacgaactccaccaagaacatccatgtggtaccgtacatgtgggtacggtgtcagaaaacccattctactaggaaatctggagtccgtaagtaaatactttcctacaaaacatatgataaacataattgcataaatgctcaattattaggagtggtaataaatgctctcttatttcaaaattttggatagtcactttgcggtaacctaggaaaattgtccggataatattgcattgcttgattcaaaaccctttgatcgtgcaccgagcctggctattcagtatcaaggaacataactcgaccgtcgtgatcacatacaactagaacatttctcgtcgtcacatggtgccggttcctgttttcgatagacgtggctactgatgccacgatggacacatgtgtgccatccacagcaccaactgagtcatagaatggtcggaatttgtttccttcaagcagcctaggatgagtgtacgtgaagttgggatcaacaggcttcaatatattcccagccaacacgtgcatagcgttcaacactcggttaaaatagatcgagactgttgagctcgagcggacccaccggttgttggtgtctctgtttggaccgtttcctgccatagtatacaagaacatcccaagtgcctcaagaccacatacctcccatgatccatgaatgtggtatttaccactcaggaggtcatgtaaactgtatatctgctcggccttcaatcggaacatggacttgcattgcctcggattcgccatcatttccagcatccaactgataccggtctgaaccggaactcgtcgtgcagctctctgattgagctcaagattgcaggctagccatcatcgtctgtttgttattacggtcatgtcatagaattaacgtgtgattggtgtaggaggcagcgaaaacaattgagatggtaatgtctcatgctacaccctctttttttcggggaaatagggaatgtattactcaggagaagcttcctcacacgcaatatgtgagataaagttacaagtatttcctggccagagctcggacacagattcgcatcgagccttattcactaaaatatagctaatacagttttggctgctttggcccttgatgaatttaatctccctatttcctattaacaagtccttgacctcacggatcggaaaggctaagtccgaatatatcactagtagagaaacaattttcttggacgaggagctatttagtttacagacggaccgttttcacgtccgcacgcaaaaatcggcctcccattttcgtgtacgggcctgtaaaaaacctgcctacaagtttatcattccttatctttttcctcctcaacacttcaaaatttcatctcatccacccatcctcatccttatcctttctagctattctctctctcactctctcacctctctatcctctctcactagatctctcccctctctttcactcttcctctctatctcactctctaacctctctatcctccctcactctctcacctctctctcactcccggatatggatggcgcgggcgcggccggtggcacggcgcggttcggcggcatgcgcgcggaggcgacctgtagcggcgggctcggcggtgcgtgcgtgcggtggcggtcaaccgtgattggcaggctccgcggcgggctcgcggtggtgagcgacagggaacagtgggctcggtgacgggctcacggtggcgggtgacggggaacggtgggctcgtagcggcggacgaccgccccccgcccggatccggccacaaatggatggagttctcggccatggagatggactccttcatgttaatgccggcgtgtcagtgagacagagcacgaaaggatccaagattccaagttgagctgaagcggccaggatgacccactgttggcgagggtggggggaggtgagggatgatgacatgtacatcatggcgcatgtggcatgtggatgatgctcctactacttgtttcgctccggggagaggcggccaggcggtgattgaagagccccaaccatcaccggggagctatggatcaggcttgcgcagcagctgctgcttgtttctctctggggatccaaggtggagatgagggatgaggacgccacatgtggcgagcttggccagcggtgcaactcgtcctacaccactccatcgtcgacatgggtcaacatgccacgtagatgctacgccagcgaaaaccgtcgtctatactgccctgatagttattttgcatcagttttaatagttgaaagagtcattatacctgattttgtgattcggggatacaaatcatatccgagatatatttgagagagttagattagaatttttccttaaaaaaagttgggccacattaataattcgagagaagttgggcccatcctcgcaacccttttcggctctccgctcgcaccaccaccgatctcatcgaatcacctcctcgagacaacaaggggaagtgcggaatggagctaagtttctttacccaaacaacttggttatgagggtttctatttcactggtatttctggtcaccaaaatttacaggtgtttcctttacacgtgagaaaaaagaaaaacgataactcctaagcaggccataaagttttattgtttgaaaaaatagcaacaagttaccccacaaatgcatagaacaacaaagccaccacaattccacatgtactttctcggttttataatagcgtcgttttgattttttgcctactcaatttttttaatagttttgatcaaatatataaaaaaataaatattttcaatataaaacaaacatattatgaaaatatattcagtgttatatttaatgaaactaatttggtgttatatatgttactaaatatgttgacttagtgaaacttaagattatttttttaaaaaaaataaagcgacttgcacattacgaaaagagtattacatccgtttcaatatatattataagtcgttttaacttttttctgactcaactttttaaatgtgatcaaatttatagaaaaatatagcaatatttttaacacaaaacaaacatattatcaaagtatattaaataactaatttgatgttgtagatattgctaattttttcaataaacttattcaaatttaaagaagttaaaaatattaaaacgacttatgatgtgaaactgaaaaaggaagtaaggtagtatttcttccatcttataatatcgaggcgactacggatcgggtgcccgatttttttagaaaaatcaggcgcccacgtcatcatgatgtcatcttgcatgcatgcatctaagcgaactttaaaatatttattctcttaaattatttatccaaatcatgatccgattgtaccattaaatccgttgcaattaaatctttaaaacaagaccacacatggatataatccaatgaaagaaatagctcattatagaattatatttaaatattgcacgctgttacaccaagtatatcagaattgtttcactaattagatcaaaaatgtttcatcggacgctgtttgaccttatatatgaaaacaatgtttcagcaaatagtgaaagaatgtttcaattcactgcaacatttaatccatacatagcgaaacatcacgagcatactaggtgaaatatttttggtggaacaaaaaatgaaacggatttccttaacagaggatttccataatatccataatatatgggtaatttattgcaaaagaatgtttcaattcaccgcaacatttgatccgtacatagtaaaacattgtgaatacactaaacgaaacatttttgatggaacaacaaataaaacggattcactttacagaggcgatttattgcaacggcctgcgtggtggggacacgtggcaggagcggcgcaggacacgtggtgagggtggcgcgcggggggggggggggtgggggaggtggggttgcagcatcgggctcctgatttgaggcattttccttgtaatatagcaaacttggcaagcactgaataaaacacatgcgaatcttaggcagggatgatgtgtccaatggaggtacgtactaataaccagtccttgtcgttgtataggacctgagctgctgaatgaaagcgtcgatgcacctctcgtgacactccgtgtcggccaccacctcccccatcttcccggcgttggcggcgagcgccttcttgctctcttcatccaccacggcggcccggacggctgcggcgacgccgtcccggtcgaaggcgccgccgtgctcgccatccctggccacctgcaccccaacccctctcgccccttccaagtagctcgcgttagtgaactggtcgaggaacagtggcagcatgacgagaggatggccgaaccggagcccctcgatgacggagctgtggccgcagtgcgtcaggaaggcgcccacggcggcgtgcgccaggatcttgagctggggcacccactccgtcttcaccatcccgcgcccgcgcgtccgctcctcgaatcccggaggcaggaggccgccgtcgtcgtcgccgccgtgaggcttcctcagggcccagaggaagggcgcgccggagagctccagcccgagcgccagctcgcgccgctgctccgcggtcagcggcgcctcgctcccgagcgcgacgtagacgacggacttgggcggctgcctgtcgagccacgaggacatgagagctgtgtcgccgtcgccgtcgccgtcaacctgcggcggcgggagaaggccgatggggacgaccggcttgccgaagatgttcgacaggagaggcaccgactcgggctcgaactccacgcagctccgcacggcgagaagctcgctgctccggaaggccgagacgaaccgccgggctatggcggaggggaaacggtcggcgtcccgcgcctcatccggcacgccgaaatgcgcgcacgccgtcgccgtgtacggcatcatgaggacgcagggaaccttgcggtcggcggcggaggcggcggcccaggaaagcatgccgtcgaggatgagccagtcgaccttgttccccgcggcggcggcggcgtcgaggaaggcggagaagggcgcggtgagcccatcggaggccttccagagagcggatgacatgtgatcggggacgtcggtggtggcctcggcgccgtcggggaggccgtcgacgcgcgggagcggcagctcgacgaactcgacggacgggcacgggcggcggaggcgagcgatgttgcgcggggtggagacgaaggacacgcggaggccgcgcgaggccaggcggccggcgagctcgagggcagggaggaggtggccgaacgcgagccacgggaagacgacgacgtgcagcggggaggcatccatggtgcagcttgtgaagtttgaggagagaagattagaacatataatggcagtcgccgtacggcagtgccactacctccgcatcaaaatgagtatagctatgggcacccgtgtacaacgtgattgtccgtcttatctacaaaatttataaaaaaattaaaaataattagttatatagtactgctaatgttttatcatctaacaataataaaaatattattcacagaaaatttttaaatgagataaacggttaaatgttggacattaatggtgtaaaataatacttattttcaaacggagggattactagttatttcaacttttgagtaatggcatcagcaatgtatgggttacaaccaggcattatggtgggccccaggtgggtcccgctaaacatatttcatccctcacaatgtatatgagaggaaggaggtattaaggtgggccccacattttaataaaatacctattaccatctcaatcacccattctctctccagccacccaaaatttccccacctgttcggccattccccaccccaccgacgacgacgacgcttgcagacaacgacgccggcagctcgcgtgagcggatccgtgacgacggtggtgctcgctgctggcggcccgcagatcgaaccgccgtggaggcgctcatcggaggaggaggcgtcggagcagagcttgcagatgatgacgacgccaggtcgtgagcggatcctcgatggtggcggcggcggcggcactcacgtgagcggatccacggaggcgctcgcggacggcgtcggcagagctcgcgctcgcggatccgcggcggccctcgcgaacggcgtcggcggcactcacgggcggtttcggcgacagatctccggcggtggaggtggggcctgcgcgcgaactccagtggcagatctccggtggcggtagggcttgcagcacaactccacacgggttctcggtactcccccttcccgggccttaatcttctttgttccattcccttggcggcaatcaacagagctggagaaagaactaattttttaatccttgagaccggtccttagccataaggacggctcatccaaaaacctcctataaggatcatctccacgatgtataacgaccgctcaagaggcttaaggccccccttatttttacattgtgcatgccctcatgggtgatggaacacgtcggcgtcctaggataatacatagtactgccgatatgattttctttaaagaagactatacggaaggtaatgtaatcacgatgtcagcatcatatcgtagataccggatatgatacatttaaaatcaaagaagtatttcgtagatattatgcacatcatgataccttcatgatgatgtcgacatagtcctatagatacataggtatccagatctagtatctaaagtatcatgctgacatcagcatgatactgtatatgtcagatccgtatcggatatgatatcttgtaggtatcggatctgatatttacgcaccatgctaacatattacgacgtcagctattccgtagaatggtgttaccgatttgtagtatttttgtttttttccctacttgtacttcctctatcccaaaataaaccaacctcataccggatgtgacatatcctagtgcgatgaatcgagccaccattgtgtccagattcattataagaggatgtgttaaatcccgtacgagtttggtttattttaggacagagggagtaggtggtagccttttcccttttttgtttttgctaaattttgctatagaacaacatggctttgtgatttacttatagcacatcgcacaaattgacttttgtgggaagacactctataagcatggaaattagcccatgaacaccgcgcccattagaattcttttctggttaaataaaagagggaaatcacgtgaaagttatgagctacccatggacccacatgacaggtctccatttttctatctctatctctcttaccccttctatttcatcttcctcacgctctcataggaggatctctttccccttctacttcttcttcctctcgctccacaagaggtcagggtgaggtgttcctgggcctggcatgcctggaaaaggtgggaggccagtgtggagagtgacagggagagccacaacgacgggtagaggagctcagctccgaccgacaaggagatgatggtggtggcgggatagggtgattaaaggagagtggaaatatgggaaattgattcatcttggcgaggcagagttgatggcataaggatttggctggtgaggctcgggtaagggagatcaaccggtggcaaggtggtggttggcatggtagagagagagagagagagaagaatagagctcggtggtggggagggaagggcaacctcgttgtcttgtatagaaggtgagaggcggtggcgcatcgcggttgtagcggaggtcggtgatgaagacacggcgacggcgacttgaggcataaggaagtgacgtcgacctcgtctgctgattggcttatcatgatgatggcagttgggttggcgggcaacgtgcgcagtgtggcgacaacagcagtgattatgatgcttatggatggcagcggcggtgcgcatgaattttcactctctgagctctcttcttctctatctaccatgtgcttgagaagagatagagatagagataggagacctggtatgtgggtctaggttatttgagaactttcatgtggtttgtctctcttattcaaccagaaaagattatcctaataggcgtggtgtccatggactaatttccacgtttataggtgtattttcccaaaagtcactttgtgttgtattcttctatgcctagaactacaaattcacgatgtcttaaagtacaggaaaagtctcttattttttttggactagtcctccagtatactaacgtcttctatttcttgaagtctcctggtacactgctgtattgtgtagtgcgtacgctgtggcgcgaaacatcgtgttggtagatgacctaaagtgctgtttggttgggctccttttggaccgatacccttgctacctgagaaataagtccacttctcatccctcagctttacctcaagttatcttatccccaatactaaaaattttcatctctaaactatacaaaatcgtgtaatttggatcccacgatagtatatatatcctattttcctctatttttgcttacatggcaaatgttcgagcccacttgttagctcgacacgaggtgatagggcgtgctacgacctgtacacagcatggcactggcagatgaaccaagcggtgagccgggtgaggatgtcggtgacaacggcggtgggaccgcgcgtattacgctaggaacaatgcgaactccagctccatcgttttctcaatacaacattatatgccatcaaaatttaaattttaaaacttaactttggaattgattttaaagttttttcatcgaagtttatttttcagtattggcatttaagtcactaggaaagatacgtaccaaaattttactcataatttttttttgctgatatctcgtagggcgtattatccgcatctagcgaaacaatgaggtctccaccatcggcattcggcagcgtctcgatctcgtagctcccctctgtcaccatccatggccgcgagcttgcacggcagccgctcgaacgtgtcccgccgtgtctgttagcttgaacacaagatcgcgcgtgcacacacacacgatggagatcgaatttgtgttggcactgcaccagcagcaaatgcacccacgcacactactgcacttctattcaccacactctgatcattaacaggctgattacatggcttaaatagccccacacgcacacacacacacttagccatgcacgtttagccgcacaacctggtcaatcagttacacaactaactgcacgagtatgcagcaggatcacctccactattcctgcatgcacgcactaatttcaccactcaccaactaatttcagtgtgtacaagcttgtagttcagacttcactcatccttcctacatgcacgtcctgaacaaatcagcgtgcaactgcctccttgactccaattagcacactaatgacacgctaatctacccaactccctgcaccactttgtgctttcactaacggctgatcagctcaccacgccacgcaaaacacactagctaatttggactcagactactacgtacacatgactgaatataatgaaaacataaacaacaagattaactctaacatcggcgtacgacaggtcacccgggagcatgtcgtagtcgccggcgctagcgccgtcgatgtgggacagtgtcgacgccgtccacccggtctgccctagctaggtcgccaaccacgacgatcgaactccacggggcagcctcgccggaggcgtcctgagtctgaactcatcgtcggccttctcgatcgcaccggtacgtagtagtacgtcgtgctcggctccagtgggccaatggtggcgtggtggatcagcgctggacttgtagaagaaatagcgcggtacatgggtggtcgcccgtcgccgacgccgtttacgtactttcccggcgatgtcccgtactccaccaccggacggtgcgttcaggtcatcggtgacccaagaaatcctcatgttcttctcccccaagatcgaaatgtgcactagattatccacttttttaagaaaacctcaaaatagaacatagagtgtaggttttcatttaagaagaagagacttagcgtagttttggagagaaaaccctcgtataagcattgtttgatgaggaaaaccaggctaaacccacatgaagaacaaactaacaacttgtgacagacttcaagactttaagaaggaaaacgacacccacaggcgtcgccatcgttggctctagcccaggatcgagcagtacattcgccccagctctctctgtccctgccaactacgactaccctagtacattcgctaaagcggcaacagagtggcaaggcgacgccaaccagatgtttgacaaaatgcctataaggaacgtggtggagtggagctaattaatctagccaaacacttttgtacccactttagcttttataggagctagctctcgctagagtcggagttgggaactatgagttggagtaccaaacggggccctaataagggcttgattttaacgaagtgaacatatggagttatacgctaaatcctttgttagtgtaaagttatagcccactaatttctaaaacttaacatgcaaagatgccacatcatcatccactaacaattattacatttaaatatcatacaaacatgctacattatatataatttaataatttattaaattttatatatttaaaatgtaagcatgttaaggctttgttcgctactagatctgggttcctaactctcccctctctttttccacgcgtacgcttttcaaactgctaaatggtgcattttttacaaagaaaaaatgtatatacaaaagttgcttaaaaaatcatattgatccattttttgaaaaaaatgctaatacttaattagtcacgcgttaatggaccgctccattatccgtgcgtactgtttgggttgggaaacagaactaacgagcacagcctataattcacataatatataaatatatctctccatattttttatcctatacctttatagtttatccttacttggttcttatttttttcttttctcttattatatcctatctcatcaatttttttaatccttatacgattatatataatctatggttaaaattatttatcttttttattttcttattaagccatatcatctcaaatttttattatggtctaaattatcttccttttttttcctcgtaaaatcacatcatcttactttcgtatttgaattaaatgtaaatcacatcaactgatgtaaacttatatttatggaaccgtatgttgtttaagctatctagtacattatttttacgtatcgttataataataagcttccgcaacaacgtacggtgtttcaacagtatatatgtctagtccatcttatgatatatattaaacctttttatatataggacaagaatatttgatgtttagatcaagaaagattttatcagaatttttaaacttccatcgtcgatagcttctcgaatgatcaacttaaaagaaatggcatgtgtagagttgtcttgaaaatgtgaaggctcaattggttagattcctagacttagtatgagtacttgaatttaggactgtttatttttcagcggtaggcaacatatactcatcggcaacgagacctcagtaccatggcatcactaatgattgtcatctatctcaaaattgcctttattggaggtgctgatggggctagctagggtgtgcgttcgtgatgatgagtggacagcatgtatatgagcacatgtatgcatactgtgtttaaaaaaattgtcatgaaactttctaccataatatcaacctattatgtattttaatataaaagtgatggttaatatcttaaaattttaattaaatcttgctgtaaactttccatgctagcttatgattgtagggagggagcatatcctatgcacataattttccgttcacaccaactattaaatgtcatagaaaattataaaataaattggacgcatacttctaatagtattacacctatgtataatcttatcttcaaattcattatattttagtcataacaaaaacgaaagacaaaattctaaccgatttttactcctaaaattaaccgttagaattctatctttttttatggctaaaatatatgaatttgaatatgagactttgcatatatgtgtaatactattaagagtaaatttccattttttttggttaattgtgggattgcggttgctgtgggatttgtggctgagcgtgatctgcttgctattgtcgtccccgtcaagttgtgcaggagggcaatgaaaactaacaatttggaaatcatagcgccggtcgctggcctccttaatcgagaaaactacacatatatcataccgtgcatcttgacaggttacaaaaggaccaagattaattatccctgtttggtggagatgtatgcagagatcccaatttcacaatcactgttacataaaatccactttaattagcaccgattggaaaccgatctttaatgctggattcataactagcacgtgtcggaagacaccgatgaaatgcgttacagatgttgattccacaatgagcacatgtaactacatagaggtgtcgattgtgaacaaacaccgacatctataagctgttataggtgtcaggttttgaaacgagcagtcacatgactatactcctagttcttgttaggtaatcaacacctctaacatcgcataggtgtcggttatctcttaccctcggttatctattaccctcttcatgtgacaatttattaggaatataaatttgtaataaccaatattctgaataagaaataaaaaatagtgaaagaatggtccgagtagaacccaatatgagattaattaaaattcataataaaagttaattctaaaattaggaaatacaaaatttaagaatataatttagaaataactaaaattcgaaataattaattaggattatgaaataagatatcatctaaaacagaacacatggttaattaatattcagaataaaatatgaaataaattctggaattaaagaaataaaaataagagttcaaagtaagaatacaatttagaaataacttaaattcataaaacagataaggaatattgaaaaaaaaacaattcatatagaacacaatatgagattaaataaaattttaaataaaaaataaaataaattctaaaattagaaaaaaaagatatttcaaataacaatacaacttagaaatgagagtttaagagagagggagtaacctgacgagctgttaagaaatagaatggtaccggttgatgggacatctaaaaactataaaaaaaaactctagtgattattatatttgacttttagtattccagtgattattaagaggaggaggggccgtgggcaggttgtgaaggagtagggtcgcgactgttgataggatttctagaaaataataataataaagaacccctaatgatgattaggttcaatttttaaactcccaataacaaaaaaaatggagtgcagcgagcaagctacgaagaagtacggttgaagtgtttgatgggaattctaaagatttataaaagaaaaaaagaaatcctatgagataataaactctaaaaaaaattataaggtttgtttttgagatgtcctaggaaaggataaaaataacgtgtggcaagttagacaagtaaataaaggaaaaaaaatataggtgcgtcaaagaaagaaggggtagtatgtgatgggacttataaaactaaaagtttaatttttaaaaatcataatacaatgagatgactatttaataaatcttaaagaaaaagcatgcataaaaaaattagataactttgtacgggtgttagacatgcaattacacaagctcacttagctagttagattaacttattctaatctaaaatgatgatcaatatttttaaagtttaaccttgctgtaaacatccaatatttatgatggtagggaatacattattatggctaacaggtactttcaccgtccccaaaaaaactcaacttctatagtttaaattttgtctaaaaaaatcaacttctatcatcctacctaacgtcggagttttatctcttaaataccctttacctatttatcaacattactacattttctaataatgagagacatatttgtcatttttactcttcactactctctcattgtaatgctaggaatgtactttttgggacggagggagtatgcgcgctaatccagtcacctaattgcggatctgcagttggtgggatttgcggctgagcatgatcggcttgctattgtcgtccccgtaattgagaaatgaaaactaaggttggaaatggtagcgccggtcgctgccctaagtaattgagaaaactacatatcatctgttcatctgcaagaccaggactgactatgaaagaaggggtagtatgcttgaagctatagtgaacaaagtgaagttactgagaccgtctacgctgcctgcagatctttagtgtcgttctaggcgttgccttttgtgtgctgtttcatttctgaggggtttaagctcctgtgtttgagcgttttgggtttgatgtgtgtgctttatacgtactacctccattttttaaatagatgacgccgttgactttttctcacacgtttgactattcgtcttattcaagaaatttacgtaattataatttattttattatgagttgttttatcactcatagtactttaagtgtgatttatatcttatacatttgcataaattttttgaataatacgaatggtcaaacatgtgagaaaaaatcaacggcgtcatctattaaaaaacggagggagtagttgagatcccagcaagttcttctagtctggtgtgttgtgacctttttctgttttttcaagactttgtatccatgtttggctttctccaaaaatccggatcaaattaaggggtagtacgtgatgggactttttaaaacttataaaattaaaatgttcaatttttaaaattcataacacaatgagatgactatttaataaatcttaaagaaaaagtatgcgtaaaaaaattagaaaactttgtacgggtgctagttatgcaattacacatgctcgcttagctagttagattaacttattctaatctaaaatgatgatcaatatttttaaagtttaaccttgctgtaaacgtctaatatttatgacggtagggaataaattattatggctaacactaactggtatgcttatccagtcttggtttccgtatacgacttggcagctaattgcggatttgcagttggtgggatttgcggctgagcatgatcggcttgcttattgtcgtccccgtaattgagaaatgaaaactaaggttggaaacggtagcgccggtcgctgccctacgtaattgagaaaactgcatatcgccctgtacatatcaccaaggccaagactgactagcggtgttacactttaggtttttatacgataaaatggtaaatttgaaattacaaaggtgaaatgaataggtgcattaacgagcaagctcacgagccgagccaaactattctttcgttaaggttaagacagggagctcaaacgaacgagccgagccaaactattctttcgttatctacccgctattttagcctaccaatccttctggtcactgatagctcgttttaatttgtcgtttgatatacatcacattttcgcaaagtatatatgtctagtttctcttcccgggataaacagaggaaaaagaacgcatgtgcttctcaagtcaacctatatcatccgaataaggtacaatttcagatgccctgtagatatataagagtagtcccaaccctccaactatattgaatatactgtcaaataagtaaataattgagatagcaaaatagttaatgaggagagagagagaaaaaagaaaaaaaatatttcgagagcattatcaatgtatatggttaaaatgatccatatagatgggaaacacataaatagactttaactataacaatcttcataatgtccagtaaaaaaaaatctacataatgtatatagatacaaggtagtattaggaaatgagagagaaatagatataggtaatattatttattccatacggatagtccatatacatatgagtgtctttttgttattttctctatataaactagttacacaatggtaatagatagctgaatggaatatggtgaatagccaaagtgatccttcaagtttcatctgaggctcggtttagtccttgatgtttcaatctatccgtattagtccttcatgttttcattttagttcaaacttatccttgaaccaacaactctcttgataaatgacacttatacccccaccattcacatatatgagacaaaaattgcatgcttgacttttttttatagataatgcctagtaaattatgtaaaacaaaaataaattatgtacaagaaagtgtatacggcaacaattgcttaagtttcatatgtgcacatgttgaaataatcggaagtacatctgtaatgttgtttattcatcttggttttctcttttctagtatatagttgtatacaaattaagggcaaaagggatattttctaatagaaatattgactagaaattgccatatggcatattaagtgggcccaaggatgatttcaagccaaaataaatatttagagtagctatgtggacaaaatgaaatatgaaggaccaaattgagccttgggtaaaacttaagggactaaattagctattcacccaatggaatactatatttcctatggattactcttgcataacattgtggatgcctcatgcaaaaaactagctccacacaagaatcaaaaataaaaacaaagggatatgtggataaaaggagagaaaagagaggtggtgattggatgataacacccattgggtatatagtttctatacttacaagtatgaaaactacttcgtagtgtttgagttgggattgtcctaagtatatagatggccatatggcccgaggcctagcccaaggcataccattttggcccgacccaagcacggcacggttcgactgggtcgtgcccgtgccggcctggcccgactaccgggccatgcctgagctgcaccctcggcacggtgggccagcctggcacggcacaatcgagaaaaatatagggatgcaaaatagactttagtaatcgtataaggcaaggccaaaaagaagaggaatacaaaattgacttattttcctgccatatgaacacagcccgcagagttgagggatgaaaaatagactttttctatgaagaagcacgatggtccagtgtgccttcgggccggcccggcacggccctagtcgtattgagccatgtatgcatcccgtgggctggcacggttgggcctgcaccatgccgtgccgtctagttggccaactatacctaaataggggagggaactcatacatccataatatactgtggatgcgtgaacgctcaaaaatcacaaaacatttcactgcacattaatactacacaaccagcccataggtatatacaagagtaaattccctgtgtatcctttaaaattcattcaatccctttcatatccctaaaatttatccaatcccttctatacctctgaaatttcaacttgatcctttccatgcccctatcgttaaatttttctttcatttcactgctacgtttggttgcaaatgacttttatgcccttgatgatttaagtatgaatataagcttgaaaaaagattgaaaactttgtttgagtgcatagtatgtgcattttatgaaactaatgagactaaataattagtgcagaaaattttatcttaaattttgaaaataaaataaatttaataaattaaaatttgtatttgaaattttaataggacaatggatttttttattgagagcattcataaataaaatattgtgagcattggtagacctatctttgtatgaatgatgctcattttatatgacctttaaaaaataaaataaatacatattttttttatttcgttatctaaaaataaattttgtcataaataatatttcgcatagcaaactttatactagtgtgatgcgacaaacttttacattttcaataatgcaattcataaatttctatgttcatccaaagggtaaaatggtcatttttatagaacgattgttttgatttgagctcttggcactagatacttaatacacacaaaggaatacaattttgaacataggttttcttcaaaacagttctcattggttatatggaatttggggtgttacaaaggtgccggtggataacactcgaagggcttatggcttccagttcctataacacgccagcacatatggcttatttgtgccgattctagttttattggcatggatgagccgacaaggattattgttttgtagtagtggtacccaaagatatttgcatgtaaatgggcaagaaatatttaatataccatgggaaacatgcaacatttttcgtgtgtcaaatggtatggatgatacatatccacctttcttcgctgtacataccccgattcacaaaagaatactagatatcgaatcccaatttagagaaccaccagtatacatgcttgtaaatcaattcaaacagaagttcataagcacaagtgcctacgaagaatcctgattcacttcaagaatctcttgcatgaccctctttagcgcccattcatccataagaattcccatatgggaagcgttctcgaccttgattgacttgaattgccccctctgtcctggctgccgacgcatctcctcgtcgaacgctaacatggtaaccagattaactatcccatctccatcaccatacactttttccggagccttgtcaaagttaccgtcccagtacaccaattgccgtggcgtcctcttccccactccattgatatacgtcaacggcaccatgggcgcctcgaggtagttcatcctcacaaccattcgtctcctgaaagtagagatgcaagtgggtagtcccactacccgcataaaaatccgtttgctagtttatttcccacatggtagtacaaaatttagaagaaaaaataaactagaagtgggataagcggaaaaaaaatcccgcttgcatccctacctgaaaggctcgatcccgtcaccgaaaccgacggcggcaaggagatcttccatatcgtacgcggagtagttcctccgctcggtgaccacgatcggctcgcgcccgaacacggccggggacgggaggttggcgatgctggtctcgaagctcctccacattggccgcagcgacagctccgtcgcgtctggcacgtagaacaggttgtgcggcccggtggcaaggttctccaccgggtcgagcagcccggcggagagcgtaggcgtgaccaggaagaggtgcttgatgtactcctttctccacgccaacggggtgttcctgacgaactcaagggcgacgcatcctccgtggctgtgcccgagaatgatcaccttcttcttgcgatgcctcttgcttgtggcctccacgagctccatgaactcctcgtagtagcgcgagtagacttgggattcctggccagggactggaggaacatgacggaaatcgtaaggagctccgtgcatgttgtccccgtcacggtatcccatctcttccagggctcgtataagcggtgtaaggcaccatggcctgcaagcacgcacatcacatcgatcgagctgatcacttgatcagagaccagattaaaactaaggagaagcacatctgcacatgcatgacacgggcagtagcatggacgcatatgtgaacggttaatttgggggaggaattaacttgtcaaaaggccatttctgatggtagcctttgacgagaccgaagtagggcacgcgggtctcgacgccggggaagttccggtagtcgttcgcgacggggtcgtagatgaggctcatctgctccaggaagcactcgttgtagcggtgcgtcgagaggtcggagctgttcttccacagcgggaaccaccccttccccttcatcgcgccgcacctcgccgccgacggccggtacgcctccgtgagccgcgcctccaggtcgctgcatgccaccccgggcaacacgacgatcgggtggagctcgccggcatcgacgtcgtttcgccggtgttggcctgaccagaggtgctctcggaggggaagtggaagcagcaggagcagcagctgtactaccaccagtggaatagatgccatggttggagtggctctgaaggtctgagggttagagtttcgctaaaatatatataacgtggtgtggcatagtctagtccctcttatgaaaaatattaaacgcttacacacacagacacacacacatatttgatgtttagagtaagatttgaacataatttttaaacttccgccgtcgatatataacttctgaaatgatcaacttaaaacaagacaaatggcgtgtatagagttgtcttgaaaatgcgaaggctcgattggttagattccttgtcttagcacgagtactcgtatttacgactgttgccttatttttttagcggtagacaaagtactcatcggcagtgagaacttgatagcgtggcgtcactaatgattttcatcaatccaaaattgccctgtacgttttcggaggtgctgataggggtagctagggtgtaagttcgtgaagatgagtggacaacatgtatatgagcgcctgtatgtgcatactgtgtttaaaaaaattgtcttgaaactttctataccataatatcataaacctattgcgtatagaagagatggttaatatcttcaaagtttaattaaatctcgtagtaaactttccatgtttataatcgtagggaatacattattatggctaatagacatgcttgtcgtccagtcttggtttccatacatatacaagtatacaacttggcacctaattgcggatttgcggttggtgtgggatttgtgtctgagcgtgatctgtggctgctattgtcgtccagacaagttttgctggaggcaatgaaaactaacaatttggaaatgataacgccggtcgctgccctccttaatcgagaaaactacatatatatgcataccgtgcatcttgacaggttacaacgaccaagattatcccggtttggtggagatgcagatcccaaattcacaatcactggtacataaaatccactttaacatcggttggactgatcttcaataccgaattcgtcactagcacctgtcagatgacaccgataagatgccatataggtgtcgattctacaatcggtacatgtaactacatataggtgttgatttgtgaacaagcaccgatatctatacgctgttatatgtgtcaggttttgaaccgaacagtcacatactatactcctagttcttattgataatcaacacctctaacattgcataggtgtcggttatctatcgccgtcttcacgtgacaatttattaggaatacagtttagtaataaccgatattctgaatgaaaaataaagaatagtgaaagaacgatgcatgtagaacccaatacgagattaattaaaatttagaatagaagttcatttcaaaattagaaaaagcaaaataggagttaagtaagaatataatttagaaataactaaaattcgaaataagtaattaggaatatgaaataagatatcatcttaaacagaacacatggtcaattaatgttcagaataaaaaataaaataaattctgaaataaaaaaaataaaaataagagttcaaactaagaatataatttagaaataacttaaattcataaaacagataagaatattgataaaatagtccatatagaacacaatataagattaactaaaatttcaaataaaaaataaactaaattctaaaattagaaaaataagaatacaacttgaaaatgggagttaaagagagaggcagtacacttgatgagccgtaaagaagtaggatagtaccggttgatgggacatctaaaaactataaaacaaaacttcagtgattattatatttaatttttagtattccgatgatgattaagaggaggggtagcgggcaggctgtgaaggagttgggtcgtgtgaaggagttgggtcgtgactgttgataggatttctagaaattaataataataataataataataataataataataataataataataataataataataataataataataataataataataataataataataaacccctaatgatgattaggttcgatttttaaacttccaataacaataaaatggggtgcaacgagcgggctataaagaagtacggtggtagtgttcgatgggaattctaaaaatttataaaaagaaattctacgagataataaactaaaaaactataaggtttgtttttttagaggtcctaggaaggataaaaagaaactgtggcaagccaagggtgtgttccgcattgccggttgccaactttcccatatcgttttccgcgtgcacgtttttcaaactgttaaacggtgtgttttttcaatgaaaactaaggttggaaatggtagcgccggtcgctgccctacgtaattgagaaaactacatatcacctgttcatctgcaagaccaggactgactatgatcggttgctaaatcattggtgtcaagttcggttttcattttaagaaaccaaaatttctttgcctgaattaattattcagtcgatcggttgctaaattgttggtacgtactgataccaattatataaattcggatggtgattacatttacggctaattattttagtggtggatgatgtgtatctatcgacaactagactactacagtgattttgtaaatctaaaaatataccggtccgattttcaaaggtacccatcgggatagaaagattgtgttattgttagattaaagtctgcttaagttctaggttttgttcaaatttactgaattttttgacacagccgactttcgagggtgttttctcttaaaccattgtttagtttgtaaatccgttctttggagttagttcctaggtctatctacttttattctgctcgatccaccgattggttttggagacgtgcttttaccgtagctttgtcaggctgcttttaggcttgtcaatcagagccgagtaacctacggtcggactggccgggtctcggttagaccgaccctaataggtcagatagaccatcaaatgtgtgttctattggtttttaaagttgaagtatgttttaatcttttaaagtttgataatttgactttcgttgatgttatgtaccatttacccccttctatacaggggcgaagccagaatttgagattagggggtgtagggtgaagataaaccatgagaccaaataactaatattgatagtaaagagggtcaaatagttaccgtaaataataagcaatgcgtaaactagtccttttaagaaaaaacttgaatttcagctctttagtaatatcattgtaagtttgaaactagtctttattgctaaattcttttaatgtaaactattaaataatctcacaaataagtatcatctattttactttgaaaaagatgagaaatcacaaactaattttataaatcatgtttattgttaatatttttagacttactaacaaactaaactgataatactttcaagctacacaaaataaactagataaatacttatcttagctaacttaatatagagtaaaaacatggggtgtaatggtgatagtgtttggataggggggtgttggcaccctttggcacccccctacctgcgccactgcttctataggctttgctcttcgtgtacaatcctataacacatccgtttgccaaatggtacggataatgcaaatctatctttctttcctatacaagccctgacacacaaaagaatagacaaccatcgtatatatgcttgtaattaaatcaattcaaacagaagtttatatatagacacgagagcctacttagaattccgattcacctcaagaatctcttgcatgacccttcttagtgcccattcatccgtaagaactgaaccatgagaagcattatcgagcttgatcgacttgaatcgccccttctgtagcgcccgttccgtcgtggcgcctagcgggaaaattatctcttaaaaaccctatttgcgaaatccgtttccttgcttgttgtctagtgtccgtgccatctcagatctcaaatccccgatctatcgtcaagttcaatcccgaatccaaatccttcccaaatcaaatccctccgcaaaagtctattttgcctctctcgggttcgatgggccgaatccctctcggcccatctccccctccctccccatctctctctctctctctccctctccctctcccccgctctgccagtgcgctgcgcacgcgtgcgcgagagccgcgctgagccgagcgccctccgccctcgctgccgcttcccgccgacgccgccgaaatcgccgcgccgcccgttgcttcccgcgcgcgcgagcgccatggtggccgaccgcctggtcgctgccgccgtcagcatctgccgcgcctgcccgcgcctgccgcccgtgtcgccgctccgctccacaccgcctcgccgtcatcgccgttgtcacgactcggcccccgccactccacgcgctagcctccaagggacggaggcagagctcctcctccctctgccgcgtcgcccccgctccctcctccttttcccaaagtagcaaggggcaagctccctttctcccttcctttttccttttcccctccccgccggcgtcatccgcctctgtcaccgttttggccgcgagcgcctagcgccagctcgcgccttgaccgcccaaggtcggtttccaaaccgacatcatcgtcctataaaccaaggcgccctcccatcgattcctcctcccgtttcgctcgccgccaccgcgccattgccgcccctctatctcgcctctgccgttcatcgccaagcaccgggagagccggtgcgttcgtggacgcggaagaggactccgggagctcgtcttcctcctcttccccggcccgaggccggagagatcattcccgtgccgtcggcccatcgtcactgcgccccgtccgcacggtagtgcatctccccgttctccctcctcaatccatctcttccccttagttttcggtagtagcatgtgtagcctccccgtagctagccggcgccgccccgactgctgccgtcgctcgccgtgtgctcgccgccgtcgccgcccgagctcggaagcgcctctcgtcgccggcctccctcgatgcgtttcctcctaatccggcgcaagggatgggttcacgtatccgtgtagatgctctcaccgccgggaatcggcccctcgtgacctcatcgccgtttcccccttttctctctgccggttgccgccgccgcaatccgccgccgtcgagcatccaccggtgaatccgagccgttggctcgtctcccctcgtcccatgcaacctcccggtgtgctcgctttcgcctgtatcgcagtggttcactccgccgctcgccgccgtcgtccgccgtccgttccggcctgcgtcgtcgtctacctcccgctggcccgcgtggcagccacgtcggcgccacctcggccgcgaccgggtcaagcagaccccggcccgccgcttccctcccccctcgcgcgcgcggtccaccgcgagccgtgaggctgcgcgtgggcccgccgcaccgcgtcctccacgaaccgcgcgcctgcgccgcgcctccctccccaaaccctagcacgccccgcgtgcacctcgctcatggtgagccgagtcgccgacaagcgggtcccacccaggaccacgcgggatggaaccggcccaccggctctctctctcccctccccgcccgcgcgcgccttgggccgccttcttgggccggccgacccattaatctcggctgagccgccccattctctcgggccgcgccctagccgcccgagggaagtctaatttccctccctccttcttttcttttcttttctttttcaaaaaggattttaataaatcctttttcctttagaccaaaaatccaataatcttagaaattcaatatcttcccaaccgtaagtccgtttgactctgttcaacttccaaaattcctcaaatctcgagatctatctaatggcacgcttagaggtcattaatagggctttattttcaccgtttgttgagttgtcccgtttcgcgtgtagtttcggagcccgaagacccgcagtgcgagaatttcgaggatcaagctcaagatctcgagcaaggcaagccacctttgaacatcttgagcctatatttgaacttaattatgttgcttgaaaaatattatgcattgatagggtcgcacttaatctgcttgtcccgtctgcaaggcagattggcggacctacctaaattattgcatttgacccttccattgtaattgttataccatgttcccttgtacccacctagttgcgcctcggtaatcgtgcactctgcacgggtatcgacgaccgccttcaaacttaaattctaagaaacatcttgggtaaaacttgagttttacaaaaagacttggaaaacccgacacctgggtcgatgcttgcgaactaaatgaatttccaaaaccgcggaccggggaacgtaccgggtgtacagtttcccgctcttgcacttaaggatcgtttccttgaaatttcatccgaacataagacaagtacgaccacatgggtggaatgggacacccctggctgagtaactaacttatcgggggagccatgatgctaagagacatgtggattcgccggggtggtgtcggggaggacccctgggcttcctggcacagtatggtctgggacctaatctggtgttggtctgggacccctctcgttggcatatggtgaacctgtgtcggctttcgaaatgccttgtcatgaaagccttaaggtctctagtcgtggccgttctgcacgggctggatgatccgggttagtaatgtcgtgtgggtaaagtgtaccccctctgcagaggttattaaaactgttcgaacagccgtacccacggtcatgggcggatgtgaggtgattcctagcgtagttttgtttgactactgccttgtgaaatttgctgttgtggaatgggtttgatgtttggaaaatcggcggctgacgggatcagccaagcccgggtggccgtttgaaagctgttggccgggtgccaatcttgatcaattcaaaagactgacacattgcacatactccgaccggacgagacgcactgtctcatccgtgtcgtttgagaagcactcccttagttgtttcggaaaagagtttaaataaaatcaatcgcaaaaacaacatcctttctttgaagcctgcattaaacacttatttcccatggcttgctgagtactcctgtactcacccttgctctatataaataatcccccccagttgctgaagaagatgaagcggatcccgctgacgaggagttcttccaggagcaagccggctacgatgagttttagggtttcggcctagttcccaagtcgcgcctgtgatgtgtggtccaagtcttggcttccgtttcccttttgtaatgcagttgtgagctcgggatctgtccgcagcccaacataactgtactcctactctataataaagagacctctgttgctgtgatattctgtcttcctgtgataccagcactgtttcctgggactggtatcgattaacaggctaatttggagcgtcacgggctagttccgctcgggactagttcggggtgtgacaccttctgtccgggctgcggacacatgtcctcgtcaaacgctaacatgctaaccagattgatgatatcatctccttcaccgtacactatctgtggcggctcatcgaagttaccatcccagtacaccaattgctgtggcgtcctgttccccactccattgatgcacgtcagcggcaccatgggcgcctcatggtagttcatcctcgcgaccgtccgtttcctgaaaggctcgacgccgtcgctgaaaccgacggcggcgaggagatcctccacatcgtacgcggagtagttcctccgctcggtgaccacgatcggtggctcgtgcccaaacaccccgggagatggaacattgacgatgctcgtctcgaagctcctccacattggcctcagagacaggtccgtagcgtccgcgacgtagacgagatttctcggcccggagacgaggttcctcacggtggttacgaacccttgagagagcgtgggcgtgacgaggaagaggtgctcgatgtactctagcgccaccattcctccgaggctatgcccgaggatgatggccttcttgttgtgatgctgcttctcgcttgctgtctccacgagctccatgaactccctgaagtggcgcgagtagacactggtggagaaaccatctttcgtcggtcggccgatttccacaatagtcccggatgcaataaaaaccggggctaaagatgatctttagtcccggttcaaaagggtaacgggcatatttgatctttagtcccggtttgtgttaccaaccgggactaaagatcatctttagtcccggttcgaatgctgtcaggacctgtcaggcccccccgggatctttagccccggttggtgctaccaaccgggactaaagtcccacccctatatatatgtcttcttcctcctccagctgcccgagcaagcttcaaaatttcttcaaaaaagaggggaggtcatgccaaaatttctattgaatttattttggtgattacatacaaatcggaggtgcctaaaaggtttgcaacttcatcctccaatgtttttttttgtcatactacatttgcacctatgttttgcacactttttttgtctccaaaatttagttgtaagttgatgagagagaaaatgtgtgtggggaagaaagaatatatagaaatttagttcatttgctaaacaaggttttataaaatagttgagaaggaaaactctagtggaagttaatattaaataatagaaaacaaactaaaataaaaattaaaagaagtaaaacacattaaaattagtttaaaactttacaaatagtttttaagaattatttggtgtaatattttatgatttttgtatgaataaagatatcttataattattgtatgactgtcattattgtaagaataattatttgtgtgcggtttttttgactcatgtagatggatcggcaatggatgtacgctgaccggcggtccaaagagtttattgacggcgtgcactattttttgagagtggccgaagctaacaggcaaaggggttttatttgttgtccatgcaataagtgtaagaatcagaaggagtattctgcatccaggactattcatttccacttgtttgagtcggggttcatgccaagctataattgttggacatcccacggagagcaaggtgttgaaatggaagaagatgaagtggaagacgacaatattccggactttgctcagtatgttggatttgaaggaaatcaaacgggcgaggaggaaatagctgctgatggtaacgacgttgcggatgatcttggtcagatgttgcaggacgccagggaagactgcgaaagtgaaaaggaggcccataaattggacaagatgttggaggaccacagaacttcgttgtacccaggttgcgagcaggggcacaaaaagttggataccactctggagttgttgcaatggaaggcaaaaaatggggttagtgacaaggcatttggcgatttattgaaactcgtcaagaacattcttccggggggaaacaaattgcccgagacaacgtacgaggctaagaagatagtctgcccgttaggactggaagttcataagattcacgcatgtccgaacgattgtatcctatatcgcggtgaggagtatgagaacctagaagcatgccctgtttgcaaagcactacgatacaagattagacgggacgatccaggagaagttgacgggcagctaacaaagaagagaattcctgctaaggtgatgtggtatttccctataataccacggctaaggcgtttgttcaggaacaaggggaatgctagaatgttgcgatggcacgctgaagagcgtcaacaggacgggatgctgagacaccccgccgatggttcgcagtggcgaaacatcgacagaaaatttaaagaatttggaaaggacgcacgaaacatacggtttggtttgagtacggatggcatgaatccttttggagagatgagcagcggccatagcacttggcccgttacgatgtgtatctacaacctccccccctggctatgcatgaagaggaagtacataatgatgccgattattattcaaggccccaagcaacctggtaacgacatcgacgtgtacctaagaccactggtagaagatcttaaacagttgtggaagaaggaaggtgtccccgtgtgggacgaggacaaacaggaggagtttaacctacgagcgctgctgttcgtaaccatcaacgattggcctgcacttagcaacctatccggacagtccaacaaggggtacaaggcttgcactcactgtatggatgaaacagaaagtacgtatcttaagcactgtaggaaggttgtatacatgggtcatcgtcgattccttgcagcaaaccacccggtacggaagaaaggcaagcacttcgaacataaggccgaccaccgtacgaagcctaaacatcgcagcgggaaaacagtgtttgctatggttaaagatcttaaagtagtgttcggaaaggggcctggaagccagcatatagagagcgaagatggtcacgcggcgatgtggaaaaagaactctatattttgggagttaccatattgggaattcttggacgtacgccacgcaatcgacgtgatgcacctcactaagaacctttgcgtaaaccttcttggcttcctaggtgtatacggaaagtcgaaagatacactggaagcacgtaatgatctgaagcatatggaacaacgcggcgaccttcacccggaaccaaaggagaaaggaagccattacttgagtccagccagctacactcttagcaaggcagagaaggaaagtatgtttgaatgcttggagagcataaaggtaccgtctggatactccacgaatatcaagcgaataataagcacgaaggagaagaagttcacaaacctaaagtctcatgactgtcacgtgttgatgacacaactgctaccagttgtaataaggggtatccttccagacaatgtccgggcaacaataacaaagctatgtgcattcatgaacgcaatttcgcagaaggtcatcgatccggatagattagaagcccttcagaatgaagtggtgcaatgtctcgtcagttttgagttgatatttccaccttcatttttcaatataatgacgcatctgctttgtcaccttgtgaaagagatctgtattctcaggcctatgtacctacacaacatgtttcctttcgagaggtacatgggcgttctgaagaagtatgttcgtaaccgtgctcgtccagaggcaagcatcgccaagggttatggaacagaggaggtcatcgaattttgcgtagaatttatcgaagaccttcgcccaatcggggtacctgaatcacgccatgaagggagactacggggaaagggaactctcggaaggaaagcaataataacggtagacaacaatttattccgtaaagcccatttcactgttctgcaacactcttcattggtagctccttacatcgaggagcacttggctctagttcgcaccaggaacatcggtaagtccgatgcatggattacacggcatcacattgatactttccccgcgtggctacgacaacatctcatgggtaacgagtcgatcaaccaacaacttgccttcctggcgaggggaccgtctgggtcgatcgcgacattctagggatatgagatcaatgggtacatattctacacgagagcccaagacatgaagagcacgaaccaaaacagcgctgttcgtgtcgatgccatgggacacgatggaacaactgccacgtattacggtgccatcgaggacatatgggaacttgactatggtcctctcaaggttcctctgttccggtgccaatgggttaggttgactggtggaggcgtaatgattgatgacagtgggatgacaactgttgaccttaacaaggttggatactcggacgaaccttttgtccttgccaatgatgtaacgcaagtctttttcgtgaaggacatgtctagcaaaggaaagaagggcagagggcctgatgagcctaagcgtcaagtggttctcccaggcaaaagaaaaatcgtcggagttgaggacaagactgacgaggattacgatcagttggatgggcaaccccctttcacggtgacgattgaccctagcatcctcctatcaaatgaagacaccccttactcacgcagcgatcacaaggagggaacaatagtgaggagaaagtacgtgcggtcaaccgtcaccgccgatgtaatgccgtaattattgtgtacacgatgtaaactattttggatgtattgattatccatataaatcaattgatgtatggcatatgttaattacgcacgattattagaggtttcaacaagtttaaatcatgtatatgttagttatatgtgatacttacaatttttaaaagttttaaatcacacaggtggcaatttcatatgtatgttaattagagtttttaacatttaatttactagcattcatatgctaattataattgactagaggatttttaaaagttttaaatcacgcaagtggcaatttcatatgttaattagagtttttaacatttaatttactatcattcatatgctaattataattgactggagaatttttaacagtattaaatttaatatatttttaaaactatcattcatatattagagtttttcacaatttaatttactatctttcatatgctacttatatatgactattcgaatttttaaaaggtttaaatcatgcatgtggcatttacatatgttaattagagtttttagcatttaatttaatataattcctacgctaagtacatatgatgattacaatttttattaattttaaatcatgcagtatgtacattaatatcttaattagagtttttaccaatataataatatcattcatatatatgctaagaatatatatatattggaatttttattaattataagtcatatatttgcttattacgatttatccacttaatttattacagacaaaaataatttttcgaagtaattgtcatcaatctttgtactttaaataatgttaatgcattaacttctattttataaacacatatgtaagcgaaaatcatatgcagtgctataatctttagtcccggttcttaaccctaaccgggtttaaaaataatttcgaaatagcgggaaaagatatttactcccggttgttgagaacaaccgggactaaagatcttttctttactcccggttgttctcaacaaccgggagaaaagattttttctttactcccggttgttctcaacaaccgggactaaagatatctttagtccgggactaaagatatctttagtcctggttgttgagaacaaccgggagtaaagatccaggggtatatatattcccggtgcgccctcgtcttcttcaccaacacttaaacgttttcggccgatcgatctctctcggcctctctccttcgccgccactgcctagggcaaatccccgcgccgacgccgccgtatctcgccgtcgtctcgagctcgtcgtcctcgccgccgcctccgcctcctccgctgccgccgcatctctggggtgagagccgccgcatctcccttcatccatctcgatctctccgatctcgatctctctccgtcgccttcgacgccgccgccttcgacgccgcgcaacgccgccgccgcatgccaacgccacgccgccgccgccgtcgccacgccgccgccgccttcgccgccgcgcacgcaatgccgccgccgccacgccacgccgccgccgccacgccacgccacgccaccgccgccacgccacgccgccgccgccacggccccacaacgccacgccgccgccgcgccaaccgccgccccgatgccgccacaccgccgttaacgaacgagaacgagaacgatcgaacgaacgagagcgagaacgaacacgtcaacgtacgttgccgcgacaacgtgaacgagaacgagaacgatcgaacgaacgtgaacgagcgaacgaacgaggacgaacgttaacgtgaaatgcaatatatatatatatatatatatatatatatatatatatatatatatatatatatatatatatatatatatgttacttcgcatttatcctaatacattttttttatcttgcagaaaagacgtgttgtcggagtcgtccgtcaagcctgagtggaagagctagccctagaaggaattggagtaggcaagtgacgtaataatataaatgattgttatatttgaaatgcaattaattaagattattagacctgtaattagacttatcatataagattgtgtagtgttctaatattatttgagttttaatataagattattttattgcaaattagacttagtatgacattattgactacggaattggtgcgactcctaggaattgactattgtagtcttaattagacttagcatatacgcacgaaacacttagcatacattactattttagtcttagcatgtaatattatttgagttttaatataatattactttatttgtaattagacttggtatgtaattattgactacggaattggtgcgacaagtagcaattgactattgtagtcttaattagacttagcatatacgcacgaaatacttagcatatacatgactattttagtattagcatgtaatattatttgagttttaatataagattattttatttgtaattagacttagtatataattatttactagctagggttgtataatatacgtcacctagacttagcttatatcacgatttgtaattagacttagcacgtaaggttgtgtagggttctaatgtacgacatttacacttagcatacatgacttagattgttaaaacataaatgtctcgtgacttagcagatgtttcttgtatcaacagatggctgaccgcgatgaggaacagatattgtacgatacaatcgcggaaggaagcagccagtactggaatgaagaagaggggaacgaggatccaaaccagtacttgaacgaggaagggaacgtggagagggatgcggaggggaaccagcaggggcacgtggaaagggatgtggaggggaaccaggaggaggaggctagtggtagtcaaccctccgttggacagaagagggcacgcgggcaacgaggtgcagcgaagaagcttgagggtcggcacatcataacggaagtggaagaagatggacgtcctagtgccccggccgaagccgccaagaactatgtacgtcacagcggttgggttgtgcgggataacgtgcctgtcagtacggtgtactggcgaagaacaagggcacgcggagatcatgagagctttgtcccagattcggagaaagagatgctgtggaccacaatgctcgagacattcacccttcctgcgggtacagaggacaaagtgaaaaggtggactctgaagaaaatggcagaacaatttcagagcttcaagggagatctgtaccagaagtatatactgaaggggcagacaccgaacttcgacacattcccaaagctaagggatcactgggacgagttcgttgcatataagacaggtgaacaagggaaggcgatgatggaaagaaacaaagaaaatgccgccaagaagaagtaccatcaccacttggggtcaggaggctatagcgtcgcgatgccgaagtgggagcagatggaggctagcttgattgagaggggtatcgaaccggcaacagccaaatggccggaacgatcgaagttctggtactatgctcacggtggaacgctcaacccagctgatggctcactggtcttcggctatcagatacaagaggctgcgcgacgactaacagatgcagtggaagcctcctctcagggcacgttccgaccagacagagatagggacgagctgacactcgccctgcagactccagagcatccaggacgaacttgagggaaaggggtgattccttggaagattggtttcaaggaggacatccacacgtacaggagtcggatgaggagcaagagagataccgaggcgaagattgcagacctagagttccgggtatcgagctatgaactcaacatgcaagaggaggtggcaaggaaggttgatgaacgcatggccgcacatcggtcccatgatccccagccgaccattcctcctgcaatggtgagcccgtcaggaaaccgtagcagctgcgcctcaacggggcaggtaggatcacagagcatggacgccatgcaaacacaggacgaatcgacctgtcccgttgatgacatcactcagcggacaccatgtgagctgcatattcctttgaagaacttatcaataaaggtaagatttagccattccgctagttgctgcttatatatgttgattactaataaataatctctcacaacatgaaggtggcgtcgggcatggccatcccaacagacccttcaggtacttaccactgcaggccgattccagcaggatactccaaggtcgaagttgagttggtcgaaggcgcgtacgaggacctcgagctggattaccctggaggagacggtgagacgcatctacgagacacatgccatgccattattctatggcgcaggcggtacatcatcctccctgggcgacaagcggcgtctcgtgcaccatctcctccggctccgccatctcctcctcaggatcctgcaccgtctcctcctcatgctccgccagcaccgtctccacctcaggctccagcatcgactcctcaggatcctgcaccgactcctcctcgtgctcctacacctactcccccgcaagctcctcttccggcaccttcaaagtcaaggggccccccagctccaccgcttgcccacacaagggcaacaaagaaggcgaaagttgatgccgccaagatcaaggacccggggtacgattgcacgcaagaggagcttgacgcttacgttgcatcagaagtcaagagacaattcaagcctcgaagtccagaaaagaagattcctatagaccccagtgtcaggaacttcttcaggggtatgtctgcatctgtcaaggaggccatcaagctatcggactatgagcgaacgctgaagaaagcatcttctggaaagtccaaaccagtccctcagcttggagagcaaccaaaccaggagatcgagccgttggtgaccggtaaagaaatgacgatagaacaatttattactgacaccggtctaactacggatcaattgctaggagtcgcaccaatcgaaaaggcggaagtgaaatacatgtacgaactcggtaaaccgcttgtcaagcctgagctgctgcagtccctacccacacaaatgtacaagttccatcagctgtacatggagatgagcgccaccggtagagagatgatcggagtgaggatcagggacacggacttcttgcaaggagatgacattctctggatcaatttcaggggaatctacgaactataccagctggacgccctcgacgtctctattatgagttgctggattttgtaagtatatcgttcagttagatttcttactatacgtctcctttaattaattaggtccttgtatataagtagaccatagaaaataatatactcccttttatcgttgtagaatggagattcaaagggcccgacggcggagggttttcgatactggattcatcgaccctcggaaagtaaacgtcgcaatgctcgaccaatatccacaagaaacagaagacaatctcgtccatctcctgaaggcgcagcattacaagacgttcatactgttgccatacaacacagagttagtttaattttactgtcttcctacataccaaatttcatttcccgtacgaacttgctaagtgtttcatatgtaatgcatcccacgcacattgcagattccactgggtgcttttactcatcgacctggaggcctgcaccgtcaacgtatatgactcaatggataaaaaagagtctacgtttgacaaggttttcgaacttatagacaggtaccgtcataagttcctttgttaattaagaaaatcttgttatgttaattgctactacgaatcatagctttaaactccatgtagggcttggtatcggttccgtcatttggtccgcggcaaatggagagaaagacttaggcggaagttcaaatttcctgtgagtacacatgctctacatttatatttctccgattcaaatacatacaagtgtatattaattagatctctcgttgtttgtcatttatttgtagtgcgcaaagcaaaagcagggaactaacttgtgcggctattacgtgtgcgagtattgccactaccttgcagaccaaatcatcaccacaagagagctcgatgtacgtacaaataaattcaaaatttcattacgtagcgatttcttgtttaattactaatcaatttcatacattcatatagtttattcgcatgagggataacctgaccacacacaaggaatttatcgcggcggttcaagaacaactcatgggattcatcaacaaagaaatccttgatcccaagggtgaattctactacgacggaaacacaattcaccggtccttagcttctgagctagcagcgagtactactacgtcgaaatcgtagctagctaggacatataatggattgtaattaatacatgactacatatgtttctatatggatgtgtacacattttctataatgtaaatatattttgttcatatatatatctatatacatatgcatttgcataacatatatatgtataaatacatatatatatatatgtatgcatatatatgtattgaaacatatatatgcatggtttatatatatatatatatatatatatatatatataaaccatgcagcaacaggggcatgcaaaaaaaaaaggtcagctctatctttagtcccggttggtgttaccaaccgggactaaagatcgatctttactcccggttatttcacccgggactaaagatagcgatctttagtcccggattggtactcccggtttggaaaccgggactaaagggggttatgaaccgggactacaaagggtttcttcaccagtaagacttgggacgcctggccagggatcgtagcagagtaacggagatcgcaaggaaccccgtacatgttgtctccgtcacggtatcccatctcctccagtgcccctataagcttcgcaaggcaccattctctgcagatcaagcacacacaaaaaaaaaaacagcagcagcagcagctatgtatagtgtccactaggaattaatatagtgagaacaacattagtgtacgtaggcaggattgttttaataataagtactctctccgtttcagattataagacgaagtcaaactgtttttagtttgactatgtttgtagacaaatatattaatatttataatactaaattagtttcatcaaatcaataattgaatatattttcataataaatttgtcttgactatttttttcaagtcaaaacgtcttataacctgaaacggagagagtaataattgctacagacaaatagtacatcgcctgtagtttggtggtcttctattccttgtcttatatttgtaatcctttgataaatttgatcgtaaatattttgtcttgtgatagtttcgtcaaacatggcgtatcacaaaactgccataaaacgaactatattatatataaaactacatatttaggatcagatttatcaaagaagtacaaatttagtaataatattatcacaaaacatgtagtatatattacgggtgtgaagggtttttctagcggaaccctctcacaatgccgaagttggccacgcgagtctcgatgccggggaagttccgatagtcgttcgcgacggggtcgtagacgaggctcatctgctccttgaagcattcgttgtagtggtgcgccgagaggtccgagctgttctcccacagcccgaaccaccccttccacttcaacgtgccgcacagctcggcaccgatggctggtatgcatcagtgagccacgcctccaggttgctgcagctagccccaggtacaacgaagatcgggtggagctcgccggcgccgacgccggcatcgtttggcctgtggtggcttggccagaggtgctcctgaagggggagagggagcagcaggagcagcagccgcaggagtggaatggatgccatgggggtgtgggtggagagtgtctctctaggtttgatggcttgaattaatgcagtgcttatatagagatagtttagcaaaatataacgtggcatgacatatatagtcattaatccctattatgaaaattatttgatttttaaaataagattagatcaatatgcttaaattccatcaacaaccacatctcgaatggttaaaaatgccttacgtataatctgcactgcgtcagcacaatatttaaaatgccttaaaatttacttacataatatcatgaacctattagagtagcatattctagtagaaaatgatgagcaatattttagaaatttaaccttgtaaacatctaatatttatgattgtcgggaatacgttattgtggctaacagctatagatggaagatggtcaaatgagctatctggcccgattacaaccgggctcaggtccaagatcagtcggaacggcacgacatgacctacactatactcttggtcggaccgagtccacccacttgctgcaccaacggggcaggcaaggcacaataagactcgggccgtaccggactgacctaaaggcatgaaatcccatcgtgctcttctagaaaaaagtcttttttacctccctcatctctttgggctgtcttatatggctggattaagtctattttgcatcccctatatcttttggccgtctcttatatggttggagaataagtctattttgctttatattgcttgaataagtctattatagctcccttgtctattttgctccgtgcctggccgacccatcgtgctgtggcaaaagcctaggcatggtccaaaggtcaggccgggccaacacgggcccgacacctgtcgaaccgtgccatgcttgggtcggctgtcgggtcccgagccttttggctaactatactaacaagcatatatatacttgtccaatattggtttccttataacttggcacctaattgcggttggtaggatttgtggcttaccgtggatctgcttgttatttgtcatcctcgtcaagtggatggatgcggcttccctgtccctaattcatgttcccatccctgttccttgccagatgtcaatcgcttattggtatcgtattttctagtgggcctccacacccttgcgcctctgtctcacgaacggcattacatctccgtttaatacttacaaacaacaccattaactttactaacatattttaggcgccaaatagatagaattgctggcgggaaaaagaattatggcgccatttgtctcagttctcccgttaaatcctccagcatccaaacaactcacatctaaacatgcattagcatcttgataaattaatctctcttatcaagcaccggcatcgacgccagatcttggtgctatgctaaacaacagcatgatacctccatcaaaggcatcacaactgcatgatgcaggagcaagtcccatgttcttggacaatacatctgctgcaacgacgtcattcacaaatcttgttgagcctgatgattcatccgctggcctgggaatgaagcaaatagaaacggtaagatcaatatgttatgctctacattttgttaaattaattgaatctgagttgaatttagtacggaaacaatttacacttgcaagttactaaactatacattctagggatctgaggttgcaaaaattatcttcacttcttcaggctacaaaatatttttgcaatgttgttatgctacaaaatatcattgtgatattgtaccaaaagaacaaatttaaagcaaaaccacaaaagaagattaggatcaaagacaagtacctgctagttccaagagctcaagctggaactcggaagcaaggcaatcgaattggtggcccgcacttgagattgatgttgtgtcgcctaatgcactgcgtggtgctcgagctcgccggcgaggtcgccgatctgctcgcccgtcgcttgtgctcggctgcaagggaccaaatcagccgccgccggcaaccccatgaagctagcttacctccgtaccatagctgatggctcagaattaaacggagacttaacgccatgcgtgtgacggaggcgcaagggtgtggaggcccactagaaaatacgaaaccaataagcgattgacatctggcaagaaacagggatgggaacaaaaattaggaacagggaagccgcatcccaagttgataatgatagcgctggtcactgcctccttaattgggagaagtgtacatatgtactatatttcttttggtaaacctcacttcaatgtctcattagtaggcacatctcaattttaggttggcttaatgagagggaaattaagatcaattttcacggtatgaatctttccgacatgccaattaacgggacatatatatatatatgtggttaggactttgatcgactattaaaaaaatatataattttcatctctgatcgactattaaaaaaaactatatataaaccatttgatgatgtgttttataacaatttaaatcacatatgaattgatcgtttaaaaggaaaagaaacaaggtaagacaaattaatcataaaaaaaaactaaggtgatatgattttataacagaagaaaagggggagataatttagaccctagatcaaccatccaagggctcaaaatatttaagatgatttgacttaattagagaaaaaaatagcattaactatatttagtagggatgaactttataaatatataggatatcactccttcttgaagcaccagaattttttttttataactggctccgagaagtgcctagacgcttgaaaaaggttttattcagggctagtgtgctttgttggtcaattttgacattactgaaatgataaggtttttaataaaaaaagttgtttaatcccacacaggctatctccatatctttcagctagcttcaatattggtgtatgatgttatggtagaaggagtatgatattacacacaatagtgttacttttcttagagttggtagtcagggatctttttattctactgtatgagtggcgtaatatgttagaatctatatgggtttttttaagtttatccgtcaattttgtttgctacggtagttaggatttagcctttcaacaactgtctttttaggtaaaaaagttttaggccctgtttagttcgcaggcaaaaattttacaccatgttagatcgaatgtttggacacttgtatggagtattaaacatagaaaaaaaaactagttatacagtttccatgtaaattgcgagacaagttttttaaacctaattagtacatgatttgacaatatggtgctacagtaaacatttactaatgacggattaattaagcttaataaatttgtctcgcagtttaaagggggatctgtaattaattaattttgttattagtcaacgtttaatattcaaatatgtgtccgtatatccgatgtgacacgccaaaactttacacccctgaatctaaacaccgttatatgccggataacaaaggccgggatgcaatatatttccactaccctgaaacaagtagagcaatattttttggtttttatctatcaaccatcccatcggtatacacaaaccaggggattcatttattacacagaattccacgcgtgatacatatacgattatcgcgcatcacgtacgtgaatatctactaatgtacctgattcacctcaataatttcttgaatgatcctctttagtgcaaaatcataaatggcaatcgtggaatggttagcattagctatatcttgacggatttgaatcgcttctcctgtcctggctgccgacccatctccctgtcaaacgccaacatgctgatacaggttgatctcgccgtctccgtcgccatacgctgccacctccggtggtgcgtccaagtcgtcgtcatcgtcccacaacaccagttgcaacggcgtcttgttgcccaccgcgttgatgcacgtcatgggcaccatcggcgcctcgaagctgtacatcctggtgacagcccgtcgcctgaaaggctcgacgcgctcgccgaagccgagggcggctcagggttggaaatttcggtcatttcggtcacccctgatacaatattatttcggccgaaatttttcattttttcatttttttcatgaatttgggtaatatttgttcaaattcaactaaattttgctcaaattttaggcaatttcggacaatttccgcaatttcgggatttcgcccccccccccccccccccgcgcggatacaaatgcctcaaccggcggctaggaaatcctccattacgtacgcggagtagttcctcttcttggtgatcacgagcggctcgcggccgaacacagccggggacgggaagttcgccatggcggactcgaagctcctccacatgggcctcacggaccgcgccgtggatgtggcagtcaggaggaggatcgaactcgaccccaccgagcctaggaacccatatgggagcgtaggcgcgaccaggatgaggcgctcgatgtgctcgccttgccacgcccgtggggtgctcggaatgaactcgaccgcgaccatccctccgtagctgtgccccacgatgacggccttcttccgcttcttcttggtcgccgcctcgacgggcgccatgagctcgtcaaagtagcgagagtacacctcggaggtttggccagggaccggcggggcgtagcggaaatcgtaaggagctccgaacaaggtgtccccgtcacggtatctcaattcttctagccagtctctgagctttccaaagcaataccctctctgtaggctaccaaaaaataataattagaccctgtttagatgggactaaaacttttaagtccctattacatcggatgtttggacactaattataaatattaaacgtagactattaataaaatccatacataatcttgaactaatttgcgagacgaatctattgagcctaattaatccatgattagcctatgtgatgctatagtaaacattctctaattaattaggcttaaaaaatttgtctcacgaattagctttcatttatataattagttttgtaagcagtctatatttaatactctaaattagtgtctaaatgtagggactaaagttaagtccctggatccaaacttagtctcgtaagaagtacttatgattctttctctgttcaagagttggctatgcatgtgtatgggaaactattttaaactctgagggaaatttgtttgtatgtcaatttaaaaggttatgaaataatttgagaaaagttgagaagatgtattaatatgtgatatatcactccataaaatatgtatgttcaaatttaacatctcacaaccaaaaaacaaatagttaatatattcacggtcaattttgttttttggtgtgacgtgtagaattttagttgtaacttgcatgtttgtggatggagtcactagagaaaatgtccgtgcaatgggtaaaaatgtttttgatcgctatacgttatactccttggtttcagaccaaaagcccgagttcggccgccggccagccaccgggagcctcgccaaccactcgctatcattgtccaaggttcctcccgccaccggaaccgtcggccgcgcccctccggcacgtctcgttcccctctgcagcgctcgagagaagatgggaggaagggatgagtggtgtggagtgaagggataaggataaggggtcgagagggttttttttatagcgcgaagtaaattttttttggggcagctgtgtaggtagtgaaaagttattttttagaagcggttgtgtaagtggaccgcatgtaaaatagacgaccgccaatgaagatctgccatcttcgctgacggtgtattaagtgtgccgccagcaaaaacaaaccgtaacatcttcgcaacatggattattcttttaatattctttattttattctgaattttatttatttataaattatatttctatttttagcctacataataaacgcgatgcttctaaggctgtttaaatactataatagattggtggttgaatttcaaatggttaatcaaagtctcattcttagacgtaatattcagaagttatgactagcctatcttttttttccacggaattgtggtaggtggagcatgatcgatctgcttctctgttacgagaaaatgatgttacaagtacaggagtacaacaagtgtggcggtatccatcctccacactgtacttagtctaaccatcatcgtctgtttgttatatggtcatcttcatacggtcatcatgccatacaattaatgcgtgatcggtgtaggaggcagcgaaaacaatggaaatggtaatctctcgcgcgctacaccctctttaattaagaaattttcatctatataaaaaaatcatccttactgaataattggatataattcttcgccctccgcttgatactacagtatagccttgtaggagttccaccgaaaaataccgcaaaagttttgggacatttgactatttgccactcatgtaagttaacactcttataattaagctgccactcttcgattctccaattagccaattacacaaatattaccggagagaggtgatatctaatattgcgtcacttttgtcattgtggcatgatatttaggtcatgtttgggcgagtttaagattctgagaagcagacggagagaatctagcaggtgaaaatctggaaaagttggcttttccagtttctgacttttagtttattttctggattccacaactttagattctcaaaatctgagtaaattctaaagggaaaagtacgaattatcccctaaactacaacagtcgactgaattaccccttaaactcaaaaaccagacaaaccccccagtactattgagagcggtttagggttcgaatagcatatgtggtagtgcagtcaacaaacattttttaacaaagctagggcctacttgtcagatcctcacccccccctctctcttctccctccccttctgaaccacgtggcagaagcggccggcacgctctcccgcacacgctcacgctcaccatgtaggtagggcgcgagagcgcgaagcatggaggtggaggcgagagcggcgtgactggcggcatgaccggcgaagaggttggcaagcgcgcctggcatgaaggcggaagcaagagcggtgcgacctcggcgagggcggtgagtacgcccagcatggaggcggaggcgagagcggtgagggcggcgagcgcgcttggcatggagacggaagtgagagcggcgtgactggcggcgcgaccggcggcgagggtggtgacggcgcggtcgaagatgaaggtgtggcggcggagacagccatgtgcggagtagggaagcgtccaccgcgctcgtttcccatccccgcctcgtgctcccgcatcggctcgccgctaccaccgacgtcgtcaagtggcgggagccacattggctggatctggccgttaatgaagagctcgcctccactgccgtaccttcgccgccagggaagagggtgtcatgggtggggctggacagcgcgatgacaaatgggttggagctctgcatgtgctatcgcatccgctacgctgccgcccactccaacctcaccgctgtcccgagcgccggtggctgcacacgccctcttcgccgccgcccactccgactgccatcgttctgagctctgccgcccccttcgtcacctcgagttctgcccgccaccgtcctcgaggttagttggtgagggagggagaagagagagtattttggagatagatagagaggtgaggggtagaagagaggggcccgctgatttaaaaagaaaagaattgctgattgggctgccacgtagaccaaaacagcttgcaaaggtgctcggtggttttttcatctggtatcgatagttgagggtgaaaaataactggttttcaggcttttgtcactctttagaaatcaataaatgcaaggagatcatcatgtttaactagcaaaattagccatgcattgcaatgggtgaaaaaaacatcaataacaatatacgtttcacatgtataaccataacaatgataatatttgtatcgatcgttgtaactaagacatatcataagaaaaattagaacatcttcaatgtaatagcccaacctcggcaatagggcaacattacggaaaacgcttctcctcgaacgtccgaagcaaggtgaaaaatcggacatacagcctgtgacacacatacacctatccaagcctataacatgcacctttaacgatatttaaaacaaattttctcgtaaattacttatctaatctacaatccaatcacaccgttgtattcgttgtaattaaatctttacaacaagatgtcacatgattatattctgataaaaactaattatatgtttcaatccattaacacttttgtttcatacgtgatagggatatgtttcaatacgtgtcttcagcatgtttcacaaaactaaactgttactactctctctcctctctctctctccacctcatgcatgcatgcatgcatgcattttagctagtttcaaaacgatttttctcttaaactaattatccaatctatccgatcacaccgttgtattctttgtaattaaatttttacaacaagatatcacatgattatattttgatgaaagaaaaacatatgtttcaatccattaacattagttgtttcatatgtgatagtgatatgtctcaacgtgtattttcaccatgtttcataaactttttaaatgtttcagttgatgattttttgtttcaacctatataacttgatgtttcactcgttagttaactggaacatttgactgactgatttcttttttgcatgctgtatacataggtggtgtgatgacgcgtaaacagtcgggtgtccgatatttggtggaatatcggacgtccgacgcggagtcgtctcccaacattacctatgcatcctttacaatatatttttcagttacatattaaattaatgaattttcttatacacggtatattacaggataacgtgatggctatattcgcaggaatacacgacctcgtatactagtattaatggaaaatctctaagccgtatggtcatggaactagattgataacagtaacatgtatacaaagtacaacagtatctataaataaaaaaaataaagaagttgtatattaaatccattagaacttctaatatctatggcatatatatacatatgaaaataggagctaataagttgttgtttaacaaatcccatttaactagcccgtgcaatattacatcagtactcccgtagttccttagaatgcgacggtggatctgtagtacactctctacagatataagcacttttaaagttatactacaatcaaacatttttagttttggggaaaaaatagttgatgatgtaagaacgattcgtgttactgtatttattgtgaaactaaatatcgcagtttataaatgtcttttaaaatagtttaaatttatatatttactggccaaagtaagatattacaaattgtgttgatgttcagtatttatataaatatcgcagtttatatgagctctctctctcggatggtgctcgtgcacagcacgtgcgggaagggagagaggaagcgggctgagagggaaatgggccaaggggagaagaaatcggcccacgaacccgagggaggcaaaatagacttttgcgggaggatctgatttggaagatgatttgaattggaaaccgaattcgacgatagattgggaaatgaagatcgggaaaggcacggatacttgacaacaatcaaagaaacatatttcgcaattaggttttttaagatttaattttcccactaggcgccacgatggaacgggcgctacaatattggaatctaatttgatgcacaaatttgcacatattataggaattctagtgaaggatgtttgcttgagttttggtatatttcatatgaggtttgagtcttgaattaaatttagatgttctttggattaatttggttcattttcaaaggggagggattaatgagattttgtggtttttgaaatgtatttgagtagatttaagaaaaggtgacagatgagagggaaatagaagaatttcaaggaacttttggaatggttcgctatttagaattatttgaataaatttggaaaaagacatgaaatggagagatattagaatttaatttattattggaaaatcttgacaacctacatggttgcaaaggagatttcctgatttcagtgaattttgatatatcggaaatttgaaagaatttgtggagaagggtttaagataggatttgaatttgacatcgagattttattttagggaggactttagagtgagattttcgggctacaacgattgttttgatttgagctcttgaaactagtgttgatgtttgatgtcgcgattctggtatttgcatagtatggagatcgttggtattaggatatatgcgagattgtagtaaaagagataggatgaggatttttatacaggttcgggcccctgaattgtcaggtaataaccctactcctgttggccgaagtcggtcgttgctcttattcactataatcacaccagtacaatatttggggtagcctatctaactgttgtcgacttggcggtctgaagtgctgactcgtagtcgacaacagggtagtcttcctcctcgaatccgcatccggtgagatcagagatagcgctagatccctcctgacagtagtcgtaggaaccgtatggggactaaataggcttatctccgatgtcgatatccggcggcttgtcttggcgtatgttgctcttgtgtcttgatctattgttccgtgtcccctctcctcctaggaggccttgtatttatacctataggtgtccccttgtccaagtagagctagggaaaccaatatagatacaatccgagtagtccttgtcgtttccatgtagaactttattcatccttccttatgcggaactactcctatatccgaaggttgtttccgtataagacatggtatgtggtgggtcctgtcgagatttagtcaactactgttaggtatgtggtatctataaccctgagaaccagatacttaatacacacaaaggaatacagttttgaacataggatttcctcaaaacagttctcatcggttatatggaattcggggtgttacagttggtaagaagattcggcacacatagtcactgatgtatacataccggtggataacactctgagggattatcgcttcccgttgttgttacacgccagcacggatggcttatttttggcggttttagttttattggcacaaatgagttgacagggatgattgttttgtcgtagtggtacccaaggatatttgcatataaatgggcaagaaatatttaatacaatgggaaatatgcaacatttttcatgtgtcaaatggtatggatgatacatatatcaatctttcttccctatacataccccgattcacaaaagaatactagagaatcccaatttagggaaccaccggtgtacatacttgtaaatcaattcaaacagaagttttataagcacaatagcctacgaagaatcccgattcgcttcaagaatctcttgcatgaccctctttagcgcccattcatccgtaagaatccccctatgggaagcgttttcgaccttgatcgacttgaattgccccctctgtcctggctgccgacgcatctcctcgttgaacgctaacatgctaatcagattaacagccccatctcgatcaccatacaccaattgtgccggttcatcgaagttgccatcccagtacaccaattgccgtggcgttctatttcccactccattgatgcacgtcaacggcaccatgggcgcctcgaagtagctcatcctcgcaaccattcgtctcctaaaaggctcgatgccgtcgccaaaaccaacggcggcaaggagatcttccagatcgtacgcagagtagtttctctggtttgtgatcacgatcggctcgtgcccaaagaccccgggagatggaaagttggcaatgctagcctcaaagctcctccacattggtcgcagggacaagtccgtagcatctgggacgcagagaatatcgtttggcccggaggcaaggttcttcacggggcccatgaaccccggagcgagcgtaggcgcaaccaggaagaggtgctcgatgtacctgtttcgccacgccaatggagtgctcctgacgaactctagaacgaccatccctccaaggctgtgcccgaggatgatggccttcttgcgatgcttcctacttgcagcctccacaagctccatgaactccttgaagtgtcgcgagtaaacctgggatgcctggccagggattggagcagcgtaacggaaatcgtagggaactccgtgcatgttgtctccatcatggtatcccatctcttccagctattctataagctttgcaaggcacctttctctacaaatcaggcacacagaagaaaaacagtagatcagcgtaggcaacattataactattctaagtaataattactacagattactacagtactacatcatcagcagattgatgtgattgaatatttataaaaaaatctatcaaacaccaaattagtttcattaaaactaatattcagaataatttaataatatgcttgttttgtgttagaaatgcagctataatttctataagtttgatcaaaattaatttaaatcaaataagaaaatgttaaaacaacatataatatgaatatattacgggtgtaaagtgttcttcgagtggaaccctctcgcaatgccgaagttggccacgcgggtctcaacgccggggaggttccgatagtcgttgctgacgggatcgtagacgaggctcatctgctccttgaagcagtcgccgtagtggtacgtcgaaaggtccgagctgttgtcccacagcccgaaccaacccttccccttcaacgcgccgcagctcggctgcaccgacggccggtacgcctcggtgagccgtgcctccaggttgctgcagccaaccccaggtacaacgaagatcaggtggagatcgccggctccgacgccggcatcgtttggccggtggtggcttggccagaggtgctcccgaagagggagagggagcagcagccgcaggagtggaatggatgccatgggggtgtgggtggagagtgtctctctaggtttgatggcttgaattaatgcagtgcttatggagggagtttagcaaaatataacgtatagcgtgacatatatagtcattaatccctctaatgaaaattatttgatgtttaaaataagatcagatcaatatctttaaattccatcatcaacaacatctcgaatggttaaaaatgccttacgtataatctacacttgcgtcaatacaatatttaaaatgccttaaaattcacatacataatatcatgaacctattagagtaacatattctagtagaaaatgatgatcaatattttagaagtttaaccctgtaaacgtctaatatttacgattgtagggaatacgttattgtggctaacagctatagatggaaaatggtcaaatgagccgttcggcccgagcacgcgatcgggctcgggtctgagatcagttggaatggcacgacgcgacctacactctgggtcgaaattaagatcaattttcacggtatgaatctttccgacatggcaattaatgggagatatatatgtggttaggactttgatcgactattgaaaaaatatctatacactttgtataatttttatctctgatcgactattgaaaaaaaaactatatataaaccatttgatgatgtattttataacaatttaaatcacatatgaattgatcgtttaaaaggaaaagaaacaaggtaatacaaattaatcataaaaacaaaactaaggtgatatgattttataacaaaagaaaaagggggagataatttagacctaaatcaaccatccaagggataaaaacaattaaggtgattagacttaatttagagaaaaaagaaatagcattaactatgcttagtagggatcgatatataggatatcactccttctcgaagcaccagaaatttttttgataacgggctctgaggagtgcctagacgcttgaaaaaggttttattcagggttagtgtactttgtttgtcaattttgacattactgaaatgataaggttttcaataaaaaaaagttgtttaatctcacataggttatcttcatatctttcatctagcttcaatattgatgtatgatgttatggtagaaggagcatgatattacgcacaatagtgttacctttcttagagttggtagtcaaggatctttttattctactatatgagtggcgtaatttgttagattctatacgggtttttttaagtttatctgtcaattttgtttgctacggtagttaggcctttcaactactgtctttttaggtaaaaaacttttaggcctagtttagttcccgtgtatagtattaaacatagacaaaaaaaactaattgtacagtttgcgtgtaaattgcgagacaaactttttaaacctaattagtttatgatttgacaatatggtgctacagtaaactatctgctacctctactgctactactatactactactagtagtactactacactgttgctactactgttacactgttgtatacaaactttgtgtacgtgtatacaaactttgtatatataaatacatagatatttaaaaaaccgaaagccaagaaaaaacaaaaaacatatacaaagtttgtatacgcgtatataaactttgtatacatacgtaaaaaaatctaaaaaaaaatacacgtatataaagtttgcatacgcatgtattaaaacctggaaaagataaaaaagaaaaaaaaggaaaaaagaaaccgaaaatacggaagacaacagaaaaaacgaaaaaaaaggaaaccgtacacgcgctccgtccgcagaagaaaacagaaaaaaaaaaaggaaaactgtacgtacacgcgcgatccgccgctcctctccgtgcgcgacacgtgtccagtcacgtgcggaagggcgcgcgcgattggtcgctaattagtgttttcgctaaaagttaccccaatatctctcaagtgcaaagagaatcatgagataatcttaggacgaatcacgtcactgagacttctgagtaaataatagccgtcagatagagcaacggtaaaaaaaaaaaaccaaccgttggatatagaatcgatcctggtcacagaagtaaaaaagttctgaacgtggcctggcttccaaacaaattatcctgaacaaacacgaggggaacgaagttctgaacatggcctggcttccaaacaaagcagatcactcaaaaaaaaaaaaacaaagcatcctaaacctgaacaaacacgaggggaacggaggcatctggatccgttttgctgtggcctgtgggagactgtcacgaataaaaaaaaggaagggctgtcagaaaaaaaaaagcggcatgtataaagtacaacgaatctttatagtacaacaaatttttgtaactaatcaaattattatctaccttaccatgtatgctggagatattaaaatcataatttcaaaaacaaaattaagttatgtttcgcttgttatcatataattaccccatgcatatataatatatgctgattaagtttatcatgggaaaataaagtttacgaaaacatctacaaatctaccgtaatcctgttgaattaattgttttcattaaaatattcttccttacaaacaagaatatttatttatgttccaaatttaagaaaatcacatccgatagatatactcgtgcgtgcggaataattggcatcaaagttctcatttaaatttataactttaagtcaaggtaacactaaggcataacataattatatattttatagaaaagtagaaaacatccgtttagtcactactacaaaatgctttttactggcggccattttatatttttggtaaggccaacccatccgcaagtaatcaaaggcctgtgaaaatagagtattttcacaagcgaaaattagccgcttatgaaaatataatttcactggcgggaatgtaagaagagccgcttgtgaaaatgtaattttgatggcgggtacgtaaagagaaccgcaagtgaaaatcccccaccagatctaaaatcccccacaggtccaaaatcccctaccccaaatccaaaattctctaccaccctaattcattcacaaatcccaaattcaccacaaatctcataatccattcaagaaattcatccacaaacattgtaatccatcacaagccattaattaaactcatatccattcacaaatcacagagaatatgaaaaaaaaaatccatcgccaggaggtagggaggacaggagcagagctagatccacctcgtctcctcacagtggccgccgacctagcttcgccgtcgacctgctgcctcgcccgagttcagccgccaggagcctcgccacccactcgctgtcattgtccaagatgcctcctgccgccagaaccgtcggccgcgcccctccggaggacggatccataacccacggcacggctcgtgcccctctgcagcgctcgagagaagatgggaggaatggatgagtgggtggtgaggagtgaagggataaggataagggtggagaggatttttttttatagcgcgaagtaatttttttccgggcagctgtataggtagtgaaaagttatttttagaagcggtcgagtaagtggaccgcatgtaaaatagacgagccagtgaagatctgccatcttcgttgacggtgtattaattacgccgccagcgaaaaccgcaacatcttcacaacatagattattcttttaatattctttattatattctgaatttcaattatttttaaattgtatttctatttttagcctacacaataaacgtggtgcctctaagactgttttaatattataatagattggtggtcgaaatttcaaaagattaattaatcaaagtctcattcttagacgtaatattcagaagttaggactagcctatctttttttttctttgcacggaattatggttggtggagcatgagcgatctgcatctctgttacgagaaaatgatgttacaagtacaagagtacaacaagtgtggcggtatccatcctccactaatgattaccgcgcacagtgaaacacaacgtacttgaatatctactaatagatatggaacaaatctccttcaaatccctcctttacgggaaaacaagacctaataagagataaaaatacatctccactgctcttatcggactcatgccaccggaatggtgacataacttttttataaaaaaaatatcaatagatatcatatgggatatatcactccacaaatttaatacatatataaatttaaaaaataataaaattgtgaaaataaatatttttaagggacgaaacactttttccaactatggtgttcactatactaaacttaggtagcctgtcactttacttaggtagtctgtcactttatatgagtggtttacaactggacacgtactatgctgcccacgcacacaacgagccaacgacgatggcgtagaactgtagatgttggaggattaattgcttggattcctaagatgcacaacagtacgaagtagttgcttgatacgggcaccatgaaacatcaagatcatcccgtcactaccagacttgagagctaccctgtgggccgctagatttcctgtaggttccgcggccaactcacaggaatattaattttcttgacggggttacttatacccacagaaaaattgtgttatttttataggttttcacacagacccacagaaaaaaagcgctgacaagtgggcctcaagaaccatcaaataaaactcaggcagccaagtcccaaaacctaattccccacccctcttcccaaaccctcgagccgccgccgcccctctattctctctagatccgcatggcgagcgcctgtgcgataccttcgacgaacggcgggtcggctaccgagcctccgcccagcgccatcggcaagatgcagccgaccatcaccaccatctcttgccggtgacgagtttccaccatcccctccactgccggtgctagccaccccaaggcccaagctcagaacctcttgatctggatgacctaaccctgggaaccacggatccagccgtaccgagtgtgggtgctccagatctcgcggttctcggctccggcagcgccggcaggagaatgggcgctgccctccttcccctcctcttcagtaagtaaaagcatccaaaaatatgtgtgtttcaatggtgaggaaacggtttggagcacctctgtccatgctagcatgtgtttccgctgctaatcccaaccaccgatttgttcagatagccgccgccggagatatctgggagttcaatttaatctgctccaaagttgcagccaaccgttctccttcaggatgaaaaagggtaagtcatactagtttacacttgtggattattttggctttcatctgtattacgtgacttgttataaaagttagtcgatatagcggaaagacgactaactttcctgatcgcttcagtcatcgatcacccaagacatgccagatgacgacacaggaacgcacgatatttgttaacgaggttcagctgaagcctacatccccggggctctgattatgggcgctcctccccaaccaatatagctcctagccactacgagtccatggccacgccgccatcatctccctgcgtgtctacgctacattgtagtcgccatggttacattgtggtgcccccctctctatttaagagagatgccaggttacagagtccgactctaactccaccccctaacacctattacaactccaagtccaactgtaaccaaataggactagtatatttgacacctattctaacaaactccaccttggcgaatatacgccacctagaagtagtagaatcaccatgccgatccaccggtcctccagacttgggttgtcttctttgcagcttcactgcaagccgcccgacgagtctgcgccagacccgccgccaccaaaagcaattgctatcccagcaaccgcttcctcctggactccacctgcaacagtgcacccacgcagcttataaagatgcgactccaccttctctccagtcatcacagccatcttgccattcatgatctcaatggtcttcctattccgattaccgcggaatattaacccttcttcatgcaaggttccaagcgaaatcagattcctctttagccctggtacatgcctgactccctgaagaacatgttcacctccatcttctagcttgattttgacttcacctactcccatggccggataacttgtgtcatcgcctaagtagacaaaaccaaactcaccagacttgtatgaagagaaccactccttccttggcgtcatatgaaacaagctagctgaatctaatatccacgcttctgcatccttagactgtgcacttgacatcgtgagaaaatcacaaccatcgctatccgagtcatttgaagaagtcactgtattagcctttgcttttcccttcagtgttggacactccctgcttatatgcccccactcatcacatctgaagcattgcaccatcttcttctttttgttcttctttaccttatgcccagcatgatcttctttgactagcaaaccctccgcttgagatgtttcaccctctttattctttctcatctgatcacgagccagcaacgcagaagtgatatctttagttttgatggtctccttgccgtacgtcaaagtagtcaccacatgctcatacgatttaggtaacgaacacaaaagaactatggccttgtcttcatcgtcaacttccacatccatcttcacaagatcagtgactagttgattgaaaacgttcacatgtgctgtcagatccgccccttcctgcatttttaacccatacaacttctgcttcagatacagtttattggtcagagtcttggacataaactgagcttccaactttttccaaattatctttggtgaggtctcctccatcacatggtacatgacccgatctgagagacatagccttattgtcgcagccgcctgcaactgcatctcctcccaatcgtcatcctctatcttggccggtttgacacccttcaaagcctttgaaactccttgttgagctaacaaatctttgaccctagtctgccacaagccaaaatttccggattcaccaaatcaaatttcatacctgtcggcgccatcttgccaacccgcgacctgactggtctgtcgccaccagaatactcgccctgctcagaaccgtctgtattcgtcttcacaatcccgtcttgtgatccaatctcagatattcaacagcaaaccgcgttcgctataatccgatgtgaccaatcttccgccctcgatgtgcctctgctctgcacgatctcgtcggcctggcttggtccacccatacgcgcgcactttgtcacaagcctctgcacaacaagcctattgagccccttgtaccacgtctgaccaatgtcctgccgagccgcccaaaaaatcgctgccgctttgttgctttggttcggctctctcttttcggctgcctatttaaagggcaagcaatacgagtctgatgcgatcatgagtccgtatccatacataactctgaatccgactccatagcaattgcggtcgagtcagccttgtccgactccgacaagtcgttttatcatccaactcctccactcgatttcttttttggctcatcaatctgtcagactcccacggcacaaaagtttccatatgtatgaagcattggtactgctgccccttgatcccttgtgcacgcacgatatgcatgccctgcatgctcatgttcacgtgaatacgctaaagccatgcacgagttccaaagctgcagcttccctgtccttgtttgcatgcaattgctcgatttggttttgcttcttgcctttgctccttagtctttgcacgccgtacgtataagacagcacctgtgctatctgtccgtgcctatgcacgcaccgcagtcgcagccctcatgttcaccatccacgaccccgtcgccccggccctccacgtccgccacgccgcgccacgctcgccggtttcgcccttccgtcactggcctcctgccgccgcggatccgcgatcaccgcattcgtcgggcgcgccgtccatggcgctacccctccgatctctccggtcgccttcggccacgcccggccccgtcttccggtcacgttccgccatcgccggtctgatcgcgagcgaggtcgcggcctccgcaacgtcctcgttgtcgccatcgatctcatcgccacggctgacgatctcctgtcgatgcgcgatccccacctcgtgtttcctcctccacatgtcttcttgatccaatgctgaaaccttatgctctgataccacttgttataaaagttagtcgatatagcggaaagacgactaaccttcctgatcgcttcagtcatcgatcacccaagacatgccagatgacaacacaggaacacacgatatttgttaacgaggttcagctgaagcctacatccccggggctctgattatgggcgctcctccccaaccaatatagctcctagccactacgagtccatggccacgccgccatcatctccctgcgtgtctacgctacattgtagtcgccatggttacattgtggtgcccccctctctatttaagagagatgccgggttacagagtccgactctaactccaccccctaacacctattacaactccaagtccaactgtaaccaaataggactagtatatttgacacctattctaacatgactgcccagtagtagatatagtttcaacacaattagttgctagggattgggttattggccctttacaacaagtttaatgattgtcagtggaatgtcagtagatctagattggttgggttcttgtgtcaaaacctgcgttgctgcattcatcaactaatctagattggattagttgatccattactgttgttgctaattattattttttccaatattaagcaagacaagttggttcccatattgtctacattatgtgatttagtttctataatagaaatttaattttttttggattactcctagagtataatatttattttacatctaaatgatttgtttcttgtttcagccttgtaattatgtctggaccaactaatttttctctagccattttgtgaagacctaatattgtggcatgacagattgacaggtactcccacactagagtccctgctattcataaaactttgtatgtgtctggtagtgagttgtttgacatgaaattaatctatcagtggaatatcatgcactatgctttcttggtcacatttagttagaatgcagatgcttttcttatgctatttttaccttgcaattcatggtaaggattgtgtgaataatgagtattatagtgttttattttctctgtttcagtagctaagaaaacatatttttagctcaggttgtatgcatgaaatcattagtgctttctagtctctagtagtgcatatacatacttcacaagtctaagtccttgtatatcttttggcaagtcacatactgctacatgtgttggatagatacatgccatcagaacaataaattagtttcagtctcttgtttttagaattttcttatgtacaaaccctttataatttaccttgttcatgtcactttgtatttttcttaacatgccatagcttgaatatttaagtgctgcagttaaatatctacagaacgttgcacatgatgaaaatcaaggtatgcttctcattcagtggatgaaatcttttcttagtctaagatgtcctagcatttgcaccatgaaacttgtcatttaagcatccatagaaaatgagtctgatcctattatcctagcatttatgtcttatctgaattggcagagtactacaggaagtattttcatggtcacttttcatttcagttgccatatttcattttcatgcttgtagttgagaaatttatgttgctcacttcagtttttccctgtactaatctatttgtttctctataactggggtattcataatcattgttatttattttgtaatgaagaaaattatgaaattgaacctctttttttaaaccttttagcttcctttgcccaaggttgaagcaccacggaacacggactgctgctggaagacaattttcttttacatgtgtttgatgaattgtaactgaaccatttaacttttctatggaccctttgtatattactaaatccggtttgaatgaatttgtatgtactgaacttagatggactatttatgtaagctttgcaaacttgaattttgatgtatggattgtgattgatgttcatatatttatccaaatcgccatgtgtattttttttttgggcgtggaactcattttttctgacggtggatgatggtttttcctgacgggtccacgtcaaaaataagctttcagaaacctgacgccagttgattttttctgtgagccaaccgacaggaattcctccgtggtcttttttctatcaaaaataagctttcaaaaatgatatttctgtcaggaaaccgacagaaaaatttaatttctccgtagtcttttttctgtcggcaatttttgacggtgcacccacagaaaagcattttctgatggtaattcatattattctgacggttttcggcctacagggtagacctgaagtctggtagtgcgtcagctagcaaaaattttatacgccgtcacatcaaacgtttgaacacatgcataaagtattaaatataggctaaaaaataactaattgcacagattgcaactaatttgcaagacgaatcttttaaacctaatcgctccatgatttgacaatgtggtgctacagtaaacatttggtaatggcggattaattaggcttaataaattcttctcgcggtctactggcggattctacaattagtttttttattagtgcccgaacacctcatgcgacaccctatataatacccgatgtgacacggtaaaactttacacccctgaactaaacacccacccccgtatttaccattttgcagcttcaccaggtttggccaactatatcgttctcaatgtcccctctaagtaggtgaaactgaagatcactaggtttcaccaactgttagttctcaatgtccccccaagtagttggaactgaagataacaccaattatccaccccctcctcctctctaactctcgatactggaaaaagaaatgtttgtatcatgcaccacacccatccactccttccccatctattcattgatttccatcgaccagtgcaacatccctcccttggtcgacacgactcccagcaagagtttggcccacacgacatcgacaaaagatcaattgtctccaccccagtgaatgagagaggtagtgctctctatcccgtttgctccatcggtggggttcatgatgtgccccggattgaggggttctgaccatgcatggatccggtggcggtgggtggaacctcactctctaattgagagtatggtaatgatgattgtgtccttcccagtgaagtttttcttggtcttccttgtcatatccatcattgcatgggttgtcttcacgcaagccttcaaatgttacaagggcagagcatatcaaagctagcgatttgagaaggctgcattattccaggttcaccttctttgatggcaaggagaatcatgttgtggtgcaatagtttatattttagcatcttcatcattgcgcttatgattataagctaaaatttgaattctaaaacttaattttggagttaattttgtaattttttattgtagtttgttttacagcatttgcttttgaatcgctaaaaacatgtatataaaagtttttctcatgttttttttgttgtgaacaagtcgtacaaaataaggataagcataagcaaaacgatagggcttttaatgctatgtatgatgttatttgtatgtttcaataagtattttatggtgtttcaatagttcatgtgaatgttgtagtttttttaatgtttcaacaagtattaattttacgattttcaacaattagaacctaatgttttatgtggatttggtggtgtttctttttctctatttatttttgatattgcgttctatgtcactaactgatgttttagtaactcatttattcttttgtgttgtacaaacaaatgttttatgggtagtcaaccgatacagtttgaccatctaacttgttttgctagatcgagtacccaaaaatccaaaatatagttgccggcaccctcccctcccgttggatttggcgaaggggagggcgccgctgaccatggggagctgcttcgcgcgagagagagagaggtacgacgagagagagacgcgcgagagagagaagcgatcagaccgagagagagagagagagagagagagagagagacttgtctcctcaccacgcactctcctcaattatccactcctcgatggttcggctcacggctcagtttttaaaaggtgttaaaaacgacacctttaatttattataggtgttgttttttttttgaaaaagcgacaccaatagtataggtgttggttttttacagaactggcacctataatcacttaagggtgtcgttgtttgtgttttcattacatggaggtaggaaaaggtctataggtgtcgattttagcacttccgatacctatagtgccgacttgtattggttgttttgtggtagtgatggtttctgcaatgtgtagaaaacaattcagcacctattctttgattgccacatggctcgttttgcatgatggtgtctagatgatatcccgcgtttatgggagttttgtataatattagtacaaataacatgtaaaatatctacattttgtataattttcatctatgcccgactattgaaaaaaaaggtatatataaaacatatgataatgtggtttataacaatttaaatcatatatgaattaatcatgtaaaaggaaaactaagataatgtgactcaatgagagaagaaaaagaaattaacaaggtaatataaactaatcataaaaaaataaaactatggtggtatgattttatattagaagaaaagggagggagataatttagaccatagatcaaccatccaatagttagaaacagttgaggtgatttgacttaatgagagaatagagaaatatcattaactatacttagtggagatgatcactttatagatatataggatatccctcctcctcgaaccaccagaaatatttttggtaactggcaccgaggagtccctagctagacgagttactccgaggagtgtctagctagacgcttgaaaatggttttattcagggttagtgtacttcgttggtcaattttgatgttaatgaaatgataaagtttttaataacaaaaagttgtttaattccacgcaggttatcttcatgtcattaagctagcttcaatattagtgttgatgttatggtggaaggagcattatattacgcgcaatagtgttactttcttagagttgatagtcaagtatctttgtatttgtattctactatgagtgacgtaatatgttagaatgtatatggttttttaagtttattatcaattaattttgtttgttatggtagttagggtttggcctttcaactactgtctaattttgtttgttatggtagtaagggtttggcctttcaactactatctttttagctaaaaagcttattgattgtacgtagtataacaaaggccgaggatgcaatatatttccattaccttaaattgagctaatatattagcatcattccaaattatagggcgtcatcttttgaaggataatcaaactcgataacgttaaaatgattgtaataattatttttatgttaagtattatatatgtatatcattagatttatatttttaagtatttttatatgatactgattttatattcgtttggaatataacgtgaaataaattaatgatatataccttctgatttgggatggtgggagcagtaatttttggtttttatttaccaaccaacccatcggtatacacaaagctgcatgggattcatttattacacagaattccacacgtgatatatatgattaccgcgcacagtgaaacccaacatatatacgtgaaacccaacgtacggagtgtctactaacgtacctgattcacctcaataatttcttgaatgatcctctttagtgcaaaatcataaatggcaatcgtggaatggttagcattagctatcttgacggatttgaatcgcttctcctgtcctggctgccgacccatctccgtgtcaaacgccaacatgctgatcaggttgatctcgccgtctccgtcaccatacgctgccacctccggtgacgcgtctaataagtcatcgtcgtcgtcgtcccacaacaccagttgcagcggcgtcttgttgcccaccgcgttgatgcacgtcatgggcaccatcggcgcctcgaggctgtacatcctggggacggcccgtcgccggaaaggctcgacgccctcgccgaagccgagggcggctaggagatcctccatgtcgcacgcggagtagtccctcctcttggtgaccacgagcggctcgcggccgaacacggccggggacgggaagctcgccatggcggactcgaagctcctccacatgggcctcgtggacgtggctgtcgggacgaaaattatgcccgtccccgtgatgaacttcatcaccgagcctacgaacccatcttggagcgtaggcgcgaccaggacgaggcgctcgatgtgcgcgtcccgccacgcccgcggggtgctcctgacgaactcgagcgcgaccatccctccgtagctgtgccccaggatgacggccttcttctgcttcttcttggtcgctgcctcgacgagcgccatgaactcgctgaagtagcgagagtacacctcggatgtttggccgggtaccggcggggcgtagcgaaaatcatagggagctccgaacatggtgtccccatcacggtatcccaattcttccagccagtctctgagctttccaaggcattgtgctctctgtagactaaaatatatatatatgtaatcaagcaattactccagcattgaatcacgtaatttcaccggtttgtataattgttaacgttttgaacaacaaaatggtcttcataatatatctttttactacttttttataatatatacataaataaatacaactgtatttttattatagttctttgtatgatatatatatatatatatatacacacacacacactattttttaaaagaatattaatagttaaagctttaagactttcactacaatcttatctaaaacataatttatttctgaaattgaaggaagaagtactaatgattctttctcttttcaagagtcagctatgcatgtgtatgggaaactattttaaactatctttttcagccccaacccagtctgatatctttctctgctcggcttgtctctcttcggctcaactcaacccacaatgcaggttcgatgaattaaaagttgaattaaaatggaaatgaaaaatgatgggggagtagtgagaaatcgatttttgcatcaattggaggtggaaatgcatggaaggcagatccacatggtggcagtactagggttaggcctagttcagcggataaaaaaaagggagagtatatcttctcatagttttctaaatatttttataactagtgacatgtaaacaacgagtggatggtttaaaatccactctccatgtgctcatctgtcccacaaactagggccctgtttagttcctccaaaatggcaaaagtttgattgttttggaacaatttttaccgaaatggatctaaacactagtggtaaaaagttagcaatttggtatttatcatttgggagcctagagtaacacattttgccaaaaagtgtgttgggagccgtgctctctctgtcattactaataaactggtaaaattttaccatgcatctaaacaccaactaccaaaacttcaatgccaaatcttttgccatcaaaacatttaccaaaaaaaattggcatagtaaattgatctaaacaggctctagctatagctaggttggtttttttctgggaataagggaccgagagagtatattgccattttaatcaggtgattcgtggactcgtggttggtaggagcgaaacttaccggttaacagggttcttgtagccgaacgaccatgcggagccgaagttgggcacccgggtctcgacgccgggcaggttccggtactcgttggcggcggggtcgtagaccagggtcatctgctccagtgagcagtccgcgtagtcgtggaccagcagctccgtgttgttctcccacagcccaaaccatcccttccccttcatcgcgccgcagtgcgccgtcgacggccggtacgcctcggtgagccgcgcctccaggtcgctgcagctcgccccgggcaccaggaagatcgggtggagctcacccgcatcgtcctgcggcgttggccggcggtggctcggccagaggtggtctcggatcaggggaagcgggagcagcaggagcagcaggcgcaggagtacaggaacgatagatgccatggatggattgcctctgcaggtctgatggctgaacgtctctgtctgtatggatctctgattccttgaaatatagcgtgcagaggcgggctagctacaagcctactccctccataatgcagcgtcagaggcgggctagctaaacgagcagaatcaacgcttgagcctaccttcgcacacccccactagttttataaaacttagatgcgaggtggtttcttttagagcactcttgctccctctgatttatactacataagttgttttatctttttcccagagtataccagagttgtccctatcaaatttgtgcttaaataataagaaaaagaaaaaaaatagattacaaatttgtagtatgtacgttgcagagtagttgtacgggtttcaacaagtttttaatagatttgtaaccccatatttaactatttgtcttagtagaaaaatattgttattatttatttttgttgggacttgtttatccactaagatattttaaacatgaattacattttcatatatttatataaaatttttaaataagacgaatggtaaaatatgcataaaaaaagaacggcgccatattttaaaaaccggaagaagtatgtgttacagaggtgtgtcaagtattaattgatgatatatttattatataaatagactattaaattacctataaatgatgtgttgaattttatggctaatagttttttatactaagtactattaaacttgcccgtaaactaatggcaaataaagttacaccatcgtgtatcatgagtgtacaccacctagcacctttggcgatgcacgtcgaaggacctctgctagctgtcacaaatttgtgctattctatttattatttacaagaatagctcgagaaaaacactattatatccactttaaaggactaaaagttaccccaatctctctccaagtgagagaatcatgagataaatcttaggacgaatcatagccgtcagatagagcaacggtaacaaaagcaaccgttggatatagaatcggtcctggtcacagaagtaaaaaagttctgaacgtggcctggcttccaaacaaagcatcctgatccctaaaaaaaaaaaaacaaagcatcctaaacctgaacaaacacgaggggaacggaggcatctggatgcgtattgctgtgggggactgtcacgaataaaagaaaaaggaagggctgtcagaaaaaaaaaacagcacgtagaggcgtattcccttgaaaaaaaaactcaacgtgacacttacagcacaacgaatttgtcccaccaggtttgacggtagtaactaatcaaattattatctaccttatcatgtatgctagagatattaaaatcataatttcaaaaacaaaattgagttatgtttcgcttattatcatataataataccccatgcatatataatatatgcagattaagtttatcacaggaaaataaagtttacgaaaacatctacttcctccgtttcaccatgtaagtcattttaatattttccacattcatattgatgttaatgaatctagatagatatatatgtctaaattcattgacattaatatgaatgtgagaaatgctagaatgacttatatcataaaacagagggagtacaaatctaccgtgatcatgttgaattaattgttttcattaaaatattcttcattacaaacaagaatatttatttatgttccaaatttaagaaaatcacatccaatagagatactcgtgcatgcgggataattggcatcaaagttctcatttaaatttataactttaaatcaagatatcacgaaggcacaacataattatataatttatagaaaagtagaaaacatccgtttagtcacctctacaaaatgatttttactggcgtccattttatatttttggtaaggccaacccatccgccagtaatcaaaggccagtgaaaatagagaattttcacaagcgaaaattagccgcttgtgaaaatgtaattttgctggcgggtatgtaaggagagctgcttgcgaaaatataatttcgctagcaggtatgtaaagagaaccgcaagtgaaaatcccccacaggttcaaaatcccctaccccaaatccaaaattctctaccaccctaattcatttacaaatcccaaattcaacacaaatctcataatccattcaacaaattcattcacaaacattgtaatccatcacaaatcactaattaaactcatatccattcacaaatcacaaagaatatgaaaaaaaaatacatcgccaggaggtagggtggacgggagcagaactggatccacctcgtctcctcacagcggccaccgacctagcttcgccatcgacctgctgcggctcccaagttcggccgctggtcagccgccgggagcctcgccacccactcgttgtcattgcccaaggtgcctcccgccgccggaaccatcggccgcgcccctccggaggacggatccgtagcccacggcgcgactcgtgcccctctgcagcactcgagagaagatgggaggaagggatgagtggtgaggagtgaagggataaagataaggggtggagagggtttttttatagcgcgaagtaatttttttccgggcagctgtgtaggtagtgaaaagttatttttagaagcggttgtgtaagtagaccgcttgtaaaatagacgaccgccagtgaagatctgccatcttcgctgatggtgtattaagttcacagccagaaaaaaccgtaacatcttcgcaacatggattattcttttaatatttcttattttattctgaattttagttatttttaaattgtatttctatttttagcctacacaataaatgcgatgcttctaagactgtttaaatactataatagattggtggttgaatttcaaatggttaatcaaagtctcattcttagaggtaatattcagaaggcctatctttttttttcacggaattgtgttaggtggagcatgatcgatctgcttcactgttacgagaaaatgatgttacaagtacaggagtacaacaagtgtagcggtatccatcctccacactgtacttagtctaaccatcatcgtctgtttgttatatggtcatcttcatacggtcatcatgccatacaattaatgcgtgatcggtgtaggaggcagcgaaaacaatggaaatggtaatctctcgcgcgctacaccctctttaattaagaaattttcatctatataaaaaaatcatccttactgaataattgcatataattcttcgccctccgcttgatactacagtatagcctcgtaggaattccaccgaacaataccgcaaaagttttgggacatttgactatttgccactcatgtaagttaacactcttataattaagctgccactcttcgattctccaattgcccaattatacaactattattggagaggtgatatctaattttgcgttacttttgtcattgtggcatgatatttaggtcatgtttgggggaagtttaagattctgagaagcagccggagagaatctagcaggtgaaaatctagaaaagttggcttttccagtttctggcttttagtttattttctggattccacaactatagattatcaaaatctgagtaaattctaaaggaaaaagtatgaattaccccctgaactataacagtcgaccgaattaccccccctaaattcgaaaatcagacatcgttcatcttgaatttttcatacaggacaaaccccccccctcccatggtactgttgagagcggtttagggttcgaatagcacacgtggtagtccagtcaacaaacattttttttaacaaagttagggcctacttgtcaaatcctcgcccccctctctcttctccctccccttctgaaccgcgcggcagaagcggccggcccgctctcccgcacatgctcgccatggaggaggggcgcgagcacgccaggcatggaggcggagacgagagtggcgcgaccgacggagagggcggcgagcgcgcgaggcatggaggcggaggcgagagcggtgtgactggcgaagcaaccggcggagagggcggtgagcgcgcctggcatgaaggcggaggcgagagcgacgcgacctcggcgagggcggtgagtgcgcccggcatggagacggaggagagagcggcgcgaccggcggcgagggtggcgagcgcgcctggcatggagacggaggtgagagtggcgtgactgtcggcacgaccggcagcgagggcgacgacgacgcggtcgaagatgaaggtgttgcggcggagacagccatatgcgcagtagggaggcgttcgccgcgctcgtcctccacccccgcctcatgctcccgcgttggctcgccgctgccgccgacgtcgtcgagtggcgagagccacattggctggatctggccattaatgaagagctcgcctccaccgccgcaccttcgccgccagggaagagggcgtcgtgggcgaggctggacagcgcgttgacaaacgggttggagctctgcatgcgctatcgcatccgccgcgccgccgcccactctgacctcaccgctgtcccgagcactggtggctgcgcgcgccctcttcgccgccgcccactctgactgccatcgttccgagctctgcctcccccttcgtcgcctcgagttctgcccgccaccgtcctcgaggttagttggtgagggagggagaagagagagtattttggagagagatagagaggtgaggggtagaagagaggggcccgctgatttaaaaagaaaagaattgctgattgggctgccacgtagaccaaaatagcttgcaaagctgctcgggggttttttcatccggtatcgatggttgagggtgaaaaataactggttttctggtttatgggggtaatttgtactcacccaatacttcaggggggtaattcgtactttttccaattctaaactgtttggagaacttctggcagctgaaagattctaggagaaggtgcgaaactcctccaaacatgcccttagacacgccagtgtggaagagtgacagaaaaagttcatgttggccctggttgtaaaggttcaggctttagtcactctttagaaatcatcaaatgcaaggagatcatcatgtttaactagcaaaattggccgtgcattgcaatgggtgaaaaaaatttaatgacaatatacgtttcacatgtataaccatgacaataataatgttggtatcgatcgttgtaactaagacatcataagaaaaattggaacatcttcaatgtaatagcccaacctcggcaatagggcaacattacctatgcctcctttacaatatatttttcagttacatattaaattaatgaattttcttacgcacgatatattacaggataacgtgatggctatattcgcaggaatacgcgacctcgtatactagtattaatgaaaaatctctaagccgtttggtcatggaactcgattgataacagtaacatgtatacaaagtacacaactgtatttataaataaaaaaataaagaagttgtatattaaatccattagaacttctaatatctatggcatatatatacatatgaaaataggagctaataagaagttgtataacaaatcccatttaaccgtgcaaaattacattagtactcccgtagttccttagaatgcgacgatggatctgtagtacactctatatatagatataagcacttttaaagttatactacaatcaaacatttttttgttttgggaaaaaaatagttgatgatgtaagaacgattcgtgttactgtattatcgtgaaacaaaatatcgcagtttataaatgtcttttaaaatagtttatatttatatatttactggccatcgtcgacagttgttatacggtcatcttcatgcggtcatgccatacaattaatgcgcgcgtgatcggtgtaggaggcagcgaaaacaatggaaatggtaatgtctcgcgctacaccctctttaattaagaaatttgcatctatataaaaaaaacatccttactgaatagatatacgccctccgcttgataccacagtatagccttgtaggagttccaccgaaaaataccgcaaaagttttgagacatttgactatttgccactcatgtaagttaacactcatataattaagctgccactcttcgattctccaatttcccaattatacaattattacttgagagagaggtgatatttaattttgcgtcacatttgtcattgcggcatgatatttaggtcatgtttgggagagtttaagattctgagaagcaaccggagagaatcaagcaggtgaaaaatcttgaaaagttggcttttccagctattggcttttagtttattttctggattccacaactatatattctcaaaatctgagtaaattctataggaaaaaatacgaattaccccctgaattatagcagtcgaccgaccgaaaaccagacatcgttcaccatgaatttttaataccagacaaccccccctcccacagtactgttgagagcggtttagggttcaaatagcacacgtggtagttcagtgaacaaacatattctttaacaaagctagggcctttttgtcagatcctagccccccctctcttctccctccccttctaaactgcgcggcagcaacgactggcctgctctcccacacacgcttgccatggaggaggggcgcgagcgtgccaggcatggaggcggaggtaagagcggcgcgattgggggcgagcgcgcccggcatggaggtggaggcgagagcagcacgaccggcggcgagggtggcgagcgcacctggcatggagatggaggcgagagcggcgcgactggcagcatgaccggcggcgagggcgacgacggggcggtcgaagatgaagttgtggcggtggagacagccatgtgcggagcggggtggcgtccgctgtgctcgtcccccacccccgcctcattctcccgcgtcggctcaccgctgccgccgacgttatcgagcggcgggagccacattggccggatctggctgttaatgaagagctcgcttccaccaccacgccatcgccgccggggaagggggcgtcgcgggcggggttggatagtgcgctaacaaacgggttggagccctacacacgctgtcccgagcgccggtggctgtgggcgccctcttcaccaccacccactccgatcaccatcgtcctgagctccgccgcccccttcgtcgccccgagttctgcccgccaccatcctcgaggttatttggtgagggagggagaagagagagtattttggagagtgatagagaggtgagggataaaagagagggtgagagactgacatgtggggcccactgatttaaaaataaaagaattggtgattgggctgccacgtagaccaaaacagcttgcaaagctactcagggtgttttttcatccagtatcgatagttgagggtgaaaaataacttattttcaggtttagggggtaatttgtagtcacccaatactttagggggtaatttctactttttggagaacttttagcagcatgaaagattataggagaaggtgcgaagctcccccaaacatgcccttagacatgccagtgtgaacgagtgatgtaaacagttcatgttggccctcgttgtaaaggttcaggctttagtcactcttcagaaatcatcaaatacaacgagatcatcatcggtatttaactagcaaaattgcccgtgagttgcaacgggtaaaaaaaaaattaatgacaatatacgtttcacatgtatagccatatcaatgataatgtttgtatcgatcgttgtaactaagacatatgataagaaaaattgaaacatcttcaatgtaaatagcaaaacctcggcgatgaggcaacattacctatgcctcatttacccaaaagaattggattatttatgtcgttgtacacatataatgtgaaatactatttcaatctcattcttgtaactaataataggattaatcaaatcttacgctgtctcggatggtcaactctagacaaaacagatattagctatcaagatggacgtaaaacaatataaacgatatgattatttttcatggagtcggatgttttcttttcctcgaatgagacagttttttttgcattgcacagtgccgaaccgggttttttttatatgcgcatggtttttttcgagttgggtcagacagtttttcagagcggtttttttataaacgacgtttttttccttacgtggagtcagatgttttttcgatccaccttttctcgtgtggattcggactctttttatcttttttttttgtataaaacgatttttatctcgtgttgagtcggatgttttctcggaccggtgtttttataatcgatgttttttctcgtgttgaatcaagtgatttttccgaactgattttcttataaatggtgttttttctcgcttttgggtctatttttttctccttttttttatagatgatggaaacttacatgtgcattgcaacgggtaaaggcttttttttgtcagtaatacaataactattaggatttgaggaataaattgaaaaagctttgcatcctacctcacttcacccagtctgcctctcctaacttctggaatacagttttgtgtccgtatgataacagagccgatcatccccattaaatatactcaacctttgagaatttactgtagtcttttgatccacttgatctcctctttttatttttcccaaaatcagagcgaatctgcaatacttgggataaaaaagaaaaaagattgtcggttggccatcattgacaaccattaaaagaagattttatccggtaaattaaagcctaattaaaaggggaaatcatgtggcaaaggatgtggaaggaagagggctgctagagaacggaataccgttcaacggtataccctttaactctcccctaaacgagatgtgcgtatagtatccaaacaagacacgcctctacaagacgtgcccctagacacactatgaaacactatagggtctggtagcttgcctggtcggctggtatagggtctagtagcttacatgtgtcaatcgctagctagctagaagctatgcctaatgcctatgcgttagtattggacagtgttccctggccgtagcctgcactaaaattattcttgtataatgagtttgcttgtggtaaaatataatttttccggtatttttgttattaaataatttggatttttacgccaaccatgcacagttatcagttggctaattggaccaactaatgattgctcatataatttagatggatcatataagacaagttgtcatctgagcaaagttgatacttgtgtcatctgatattgacatgtatcatgattcatgagtagtgtctataggtatcaggcatagtacctgggtaccatacttgatacccgtgcatatcagacttgatacttattatctaatacccacatgtatcatggatgatacatataggtatcaggcctagtacctataggcctcaaacctagtacctaggtatcaaacttggtatccgtaagtattagacctaatatttgtcatctgatatccacatgtattatggctagtgcctgtaggtatcaggtatggtgcctgagtatcaaactcatctaatacccacatgtatcatggatgatacatataggtatcaggcctagtacctataggcatcaaacctagtacctaggtatcaaacttggtatccgtaagtattagacctgatatttgtcatctgatatccacatgtatcatggctagtgcctgtaggtatcaagtatggtacctgggtatcaaactcatctaatatccacatatatcatggatgatacatataggtatcaggcctagtacctataggcatcaaacctagtacctaggtatcaaacttggtatccgtaagtattagacctgatatttgtcatctgatatccacatgtatcatggctagtgcctgtaggtatcaggcatggtacctgggtatcaaactcatctaatacctatatgtatctgatacatataggtatcaggcttggtacctaggtatcaaacatggtatccgtaagtattagacctaatatttgtcatctgatatccgcatgtatcatggctagtgcatatatatatcaggtatggtacctgggtatcaaacttggtacccataaatatcaggcatgataccttgtgtatcaaatctggtatgcacaggtttcagagctagtaggtttcaaagctagcgaaaacttgtatcaaatttggtatcccatggaatttaagatggtacgtatttgagttgatacttatattactattacgaaatagtatgggttacaaattgaagatgtgtcgggatagaaaacacggaatgagataggtcaaacttgagcattagaacttatcatagtatattatagggaaaatacttcacaaaatcaatacctccaaatgtgcttcaactgaaaatacaaaaaagatcaagaaataaaccaagaataaaaaaataaaagaaacaccactaccaaggtaactagaaccgtggcagtatctaagagtagatgcatagactttaacacgaattggacttcttttgtttctttctcaccactcactagacaacgtgtcctctcatcattcaaaaggcaccatgcaactaatagaatagggacaccatgctgagtgggagcctgggatgagatccagccacgtgggaattaatgtgagatggatcacgtagggccgacgacatccttagtaggatatattcgttaactgtcccgctgtgacgggatagcgtcccttagtttttccctggaatggaaagaatagagaatcaattttttaattaattagaggagaaaatatatggatagacactttattatttattatttatagaatttggggcgaacgttttttttacgcactttgagttggacttttttttctttttttaacggactagaagttttttttccggagtctgacttttttttattaggggagtcggacattttttttccttttttttacgacagaatttttttctcgcccttttttttatatacggagggcggaaatatattttattttttaaagtagtagagatagtgataggtcgaatagagggaaattctagtgaggaaactccgaccattacaaaccaccaaccggggggcctaattaaaaaaagggtgaatagccaatacagtccttaaagtttcgcttcgggcttaatttagttttcgttgtttccgctcaaacaaatcctccaaattaattatttgggttaatatagtctttggataaaaaaaaagccacgtgagcatgccaagtcatcctcgcatgcagcagtatgaatgaaataaccattctatcttatataccatatagaaaagaaagaaaaggacacagacaaaaaaaaaataacaggctagtccaggcccaacattgttacggagggtggccgacaaaggaattcatacgatacgatcagtgcttggacgcatcaataataagtgacaattctaaaacgatcatacgcgtgagaaacatttatcttctttcttttctatatggcatataagggtataattatcatttcattcgtattatcgatgcatgtgaggatgacttggcatactcacgaaacgtttttttttcaaaaactatattaacccaaatgattaacttggagaacttgttgaacaatttaaaacctcaactactaaatttagtccgaagcgaaactttagcgaccatattcaacaaaaggaaaaaatctaaccgaaatcaggggtcttagtgcacaattctctcctcctgctcccgtccactccgctcgcgcatttcgccgaacaccgtggctaccgccggcgccggcgccgcatccgacgaccccccaagttgggattcttcctccaaatggctccaggtggttccttgctctgcgtcttccttcaaaccgtatcctctctctaatctctctcccagccataaaccctagatcctcttctcccgcagtgcaacggctactacgcaccgacctccgcgcgcgtctgccgccgcgactgcttcggctttttgttcctcactaccgccgccgccgaggtaagcgccaccgacgatatcgcttcccactttccaaccctatcggagattctagagatccatgcgcctacttgcgcgtgggcggaatttggaccattgcatccgcaaatacacttccttgggggagctcgatccctttggttcatcgaacgcgcgcgtcctcgccgaataggaaaaggacgatactgcatcgtgctaccttgatgcaagaacatcgtttgctttctgttccttgcagtattggtaactaattgcaaattagggagatgaactttctgatgtttttttttttgtttcagaggaagtcactacaacaatgttcgatcgtgaggagaaatgtctggtttaggatctcttgactatcatcgaatcaggaaggtttgtactgatttcgcatcatgtacttctttcttcaccaagcacgtatccatcgttcatatgtagtgaatgcctctctagtctctactgactgtttgtggtacatgggctatcgggcttacacttcaaactagtataatttacacaccagattttcatataaagatctgacgtgccaaagtggacaacacatggtccttcttgttatactatgtgttaaatttcatcattgttggcatctggaataatacttttttttagataagggtaatttttacccggcctctatatccaaccaaatatatgcatcatttttaaattgagaacttagctctcaaataacccaattcggcaataatactggagacggatccttacaattcagcaactgtctacggttaggctgactgaatcctgccatgtactgtgtgttacagtgatgcatgttctatctgctgttttccacaccttcttttccagtgagtgttcagggatcaattcctggacatggtacaccgtacagtagcagggtataagccagagccccaggaactgaaagtgcgcagagcatgattctcgcagaaaagaaacaaccatatcttgttgatttgtagcagattgagttctgcagaaagcgcaaggcttcttgcttggaagcacggcaaaggttcttcctttgacagtggtaacaatgcccaaacataaggtgacaaaatcattcagtgagcagagggctacagcagtacaggtcagcctttccagtgctgtgtagtgttacatattctctgttctgtcatcatcaagtattgctcagtgctcactactcactactaggctatatttttgctcctatttcttgatcaggatggagtgatcgttttgtttctagaatcatcggaaccaagtgattagtcaaaaaattgttcccggatatagtatgcttgaactgaggggctgttcagattgatgccatttcaaaccatacaatttttggtaaagttgtcaaagatatgcatacatttagtttttttaatcaaactatggtaaatacataagaaatcctgccaaaattttggtaatattgccagcattttattttggctacaatctgaacatccccttaatattgcctcttcccattcagttcctgtcggtaataacaaatctgcacattgataaacagttctccagtaaggaaggctggaagaaaataggaatgaacatggtatgatttccattattacttgaatcagccaaacagcacatgccattgtacagtaaatatctgataaatagttagctcacacaatgccctcgctcactcaaaccatatacatcaagataaatagaaactcgagcctcagtgatacagaatcatgaactgtagcaaagctatatacactctcagaaccagaacagcacacttgcaaacaaagccatgaaattcgctcccctacgtaagttttggtgacccttccaattttggtggggtcatgaggctttttgtcagccatatcgccgtctctctggacgacacagcaccttccccaaacggtctgagaacgccagcaagctcctcaagcctctcctgcttcagcagcttggcgcaaagctcgagtagcgactccagtgcgtcagctctctgctgcactatgttcagatggtcccactcggcaggagtgctatctgaatgtgccaatttcaccgcgctcttcggtgatgattcttctgtaacgatgggaacgtctcctgtgcctggttttgatccttggtgagtgtgtgctttcacttcctttctctgctcttgcactactccaatggtcagttcctcctttggtattggtgcctcattaggcttctgaattgcaccagagactggcacgacatctactgtgctgctggttcttacagctttaagaaagatggcctcatcaatctgtcgatcggttattgtcatcaaattttcctctatctgttgaaaaagcgtcaaatcatcgatgttttgatatgctttgtttctagcttgaggatccacagatacttgtgaaatgcaggcgtcctgggtaccaactgttgaaacatctgaaatatatgtggagttgtctcttgtatccacagcttgctctgcagcggtttctaatgcttcactggatccattggttttgatgattcgctttctgccactgcctggttttcttgactgctgcttgtctcccaggttacttttggtgggcttcactggaaggtagattggggagcagctgcatgattcagctagataaggctgcaaatatgggtgcctcaatagttctccagcctgtaaatttttcagtttaactttgaatgtgaagtgttctgtcggtgcctttgattgaaacagtgaaactgagtttgtggtacttacagtgggtctatgttctgggtttttccttagcatgctcttcactatctgcttcctgccaaacaaagcatcatgtttagcataaattctgatatatattatgggaaaatcattaaaaagttaataatattggcactcacagtgatgatgaatatatcggtggcattggagatattgaagatctgtttattttgttaattaatgatgccatgtccttaaaaaacaagaggggatatttcatgaaccatgttatacgtaaacagtaatttatcgtttgaattgtgtagtaggacttactgcagctttgaatgcagggcggtgtgctaagatctcaaacatacagcatcctgatggtaaaagatgggaaaggattagcatcataacagaaaccgtgaaaattactccaaaagctgttgtactgggaactcaccaagtgaccatatatcagatttgtaaccataaggtatgtctgctagtatttctgggcacatgtagtttggggttcccacaatctgaaaaacatagatgttgaattcattgagtggcaatggaacctatcagttcattcacatgtcacaatattttgaatgaagaaggtaggaaagtgtcctactgttcatatataattctataaataaatatatacaaatgaaataacactgccggaactatactgaaatggcatcacatatttctagaacaaaattccattatctataccatcataaaagaaggcaatggtggtggccatcaatgacgagcgggccttcatatgtactcaaggtcaaagtagaagggagcataaaagcatcttttttttcaactaaagagagaagtgggtacttacatatttaattttagaataaaattaaggggcatatttttttttgccaatttttgttgttcaatctcttttcatgattattaataagacaagtgaaaaaaaaattatatacagttaaaaatcaaagttcaaagctattgtatttcgtgatgcagacattaatttttcccacatgaatatgtaataccatacaatttttcttttgaattccgtaacaaagtacgggcattctgctagtacgattgaagatcataagccataaagaatttagttatgaaccactattcaaaatcaaaagggtttacatgaatggtgtttatacatgttatgatttagtgtgactttatgtaggtaactgcatagttatgtattctttgctacctggaaatgtgttttgcgagttatatttacacaacatgatagcacaggtttaagccataccgtcgatgcaaggtcctccatgagcaattttgctagcccaaaatcagctgttttcaagaaacaatgaatattcaggtcactacactatcatccaagaaaaaggaaagatgcagtaatttatatttatggtgaaatatatatttcttaccaagacggatgttattatcctttgttaacaaaatgttggaacactgtaacagcacaggagccaagggcatgttaggtgatgctgatacctgatgaatcgacttgtgtggatagggacaatgttcatttaccttgaggtcacggtggagcacacggttgcagtgcagatagtcaagggccaagagcaattgtgtgaaccatcggcacaccctctttgatcatacaagtaccaaatcagcggtaagtttccaatccatgaacagtttgtactgctcattgatataggtggtaaaatcaccatttcatctacttacggtgttcttacctcttcagagaaaaggacaccccttgccttcttgatcctctctgccctgtgattccgatgtcagtgactttggaggttggagcaccaatggaaggtaaaaattttaggaggcagtgaagagtgaaaaatgtgagaggttcttacatgtcacctccttcacagtaacttgtcacaatgcatgccgaggtcccctgcaaccatcatcgaagaagagaaaaaaggacaaaactttagaacccttgattcgaaggaatgcaaattactcccagaactgaattaatgcgtggaatttgtacttcatcaacccaaccgtccttgtactcgacgatgtacgggttgctgaggctcgccatcagggacatctgtgcagcaaacagcaagcaaagcatcaaaatcaaatcatcaaaccaaaccatctgtcccgtcctcccaaacattcaatcaggtatgaactcgaaaagaaaaaaaaaagctattttctttaatccatcgcgcagtaatttctggtaatctcaaaagggttttgcagacgcaacagcaaacaactcatgggtgcaacatgtttgctcaagtgtggggaatgaacaagaactaacgagggtttcgatctggtttacctcctggtacgccgtgcgctggaacttgtcgttctgcttggacagccggatcttcttcatcacgtacctgcaccatcatcgagccaagaaagaacagaagcatcagggaagcctgaagaagacgaaggaagaagaggaaaggggagcagaggaaggaggagaacctcttgcgctcgcccttgtggacgacgaggtatgcggagccgtaggcgccccggccgatctgctccaccacctcgtactgctccatggctctggctctggctctggctctgctcccaggtgcgtcctccttcctcctcctcctccctactctgttcttgctggctactgttgcttgggctgggggactagaaatgatgcttctgctctctgctctgcgcctcgctcgcggacctcgtgataatacgcgcgcgcgcacgcgtgcgggagggtcgcaataatggcgggcgcgaggttgagggcgtgtgtctggtaggcagcctctgccctgtccagtggacggagacgacggagacggagaccgagacgaacgcagcaccgcgcaaccactgctgctgctacttgcctctgggcttttgcgtgtgcgtcgctgttgcgcgttttagctttttgttaacgggaggggaggggtggtggttaaggattaaggcgtgttttgtatgggactaaccaactagtataatcaaaatcaatctctttctctctttctttaggaaggaggagagtgatcgtactgcctacgtgtaattagtagtggagggaacgtttgctcgcgtctgcgggcgggcggtgggtcccacgtggcggtggatggtgggctggtggcgcgaccctttcgtctcggtttctcacgtagtggcacactctcccttccctttcttgttctacctctgctcttttttctcgtcccctctgccccttttttgctccgctttggctgcattgcatgtatctatcagtctatctaactcaggttcttaaataacttgctctcttgtggggttggctgctgctgctgctgctgcggcgtgcctttctcgctgaaaaggaaggctgctgcacgcatcatacgcatatggtgcccacatgacatgagttgcactgcactgcactgcacctcactcactgcctgctgtagttttctcattcttttgaggttttggcacccacagctatccccctagtgtgtcattgtacatatgttaattgcaaaacatgggtctctctctctctctcttggccagaaaaagacgacccttcttgcttcacactgtcacactagtgtcatgcatatgcatacactgtagtaggtcactagtgtagcaagtgatcgatgcagtgacaacggcggcgagtagcccaagcatagaatggcctatgcagtttatactattgcgagtgcacagtgcggtaactgatcccacgggagtaggagtagtagtaaattgtgagtagttttactcctgcaccgcttgttattattagcggtcgcagtaatagtagtggcggagctgctgttgcatgctgttactactgctatcgcatgtgcttttttcctcgggatgcgctcagtggatctgtggtagaagtcaatgtcgagattttgggccactgttgctgcgcatggcgagttgcagatgctgcggttttggcctctgccaagtgtgaacaccaccatgcactaaaaaaggagaagaaaaaatttgcaaaaatattaaagaaaggtggattttgtatactagcatactgaaagtatgattggctagctggtgatgccaagctcatgtccatttccgtgctagctccagctgctacgctaatccactagtagtagaataatttggtcaccagaattcgatgcatattattttcttccaaccgaataattcgattccatcatagtttatgctaaaatcagataatgcagttctcccctgtttctttttttgctttgaggatttcggatgctgacatgaaacacgacctgaaaccctcaattatcaggcaggttttttttttgcagattgcctgatgattggtttgttgcatggttgcctctgcttgtctgggctgtagctttttgactggaaactcaactgtgcgtgtaggcctggaggactcaactgtccatgccgctacctctacctagaaacaaacagggtttgatttctcgtctggtagctggtggccatggctcgaggttatccaccgatgattatgcatgccctactcccactggtacgtgtttgttggtgagccaatcaaatcactcatgactaatcaaacaattcgacaaaccaccttgttgttatgcccttaattatccttccttcctcgttacaccaccacatctgcccaaataattctgccaaacagtactactagctagctaggtatggcttttgataggatttgggttaaaaagaatatcaaggaaatatttttttcctggaaaatttgattggagaagtacactacaagagtgagtgccgatatgatgccggatgtgacgctctatctttgcgttaaatctgttgccctatcgagcagggaattgggcgtacgtatgcttaattcgcttaattgtggctgtagtacgtggtgggaggtcagtgcttgggcgatggcaacgtgcttgacattttggcatttcggagagtaccatcacacgtatagttcttgccttctacgcttgcaagaaaagttgcagtattaggagtagtactgaactgtactgtggtacagtcactacgtttcagacttggaagtttctgttggtgtcgctgtcaaaaccgactgcgattttggcttctcgtcgcgtcgaggtcgtcagctacgagtcttgagtttcacatggagatcagatcagatcaacgacgactgaaattttccgtgtttctgtgaaccataaataattgagatttgatgctctagtacacatctgggctttatgctcagttacagtgcttattactgtaacacaatgtagtgctccgtaatgggtgctgatgacagtgataattaaaaaactagtcgtacggcatcatacatatagacatatagtactatagaagtactaatatttgcacggagactttggatttttttttagaagatctgagccatttatttttcgtgatttggtgtcaatgtgcgcaggagatgggccctgcaagaggtggggtgtgaggtagcgctctgcgaaagaggagaaaataaaaaaaaacgatatggttttggtttggccattgctttcgccaatgtagaaagagaccagcgaactgcctgtagacttcgcagtagagtagccgtgtaggaaagatatgtgtatttggggggcgttccgtatatatcatcaagaccgtgcttaggctgtactagcacatttaattcatgcacgtatcaatccaggaaaataaattgttgcaagtatgcgtagctattgccttcatggctttcatgcatgtttgttgcagtctactagacaggggcctttcctctgccagtgtgttaatatgtctggttctgaatgatggtgatatgcaattttgctgtgttgggctcgagctatagccaatgcaatgaaaaggcctagttaccagttaccacacctgattggatcagatcagatcagccaaaatctcgtttcagcaagaaaaggttaattagttaaaactagctgtatataaattatatacacacacccaaggttggtctgcattctaaagtgacatacacaatgtatattgctacacagcttacagattttagacctattagctcgatcgaacgacccctgggattaggatgcatggggaatgatttgatcctacattatcaagaatgagtagtctgggttcggatgccagcgtgcgacaatgaagaaacgggtggcccttgttacgattactttgaacataactcgtccgctatggagcagttattaataatggttacatagagatgaatagggctatgtggaaattgcagacgctgcttaaaatcatgatttttgatgcagtatttacataaaggcgttgtttttactaaagataatctagctagagacggaactggaacccgagtaaacgtcgttgcataattttcttattgaaattatgctaaatttttgtggagagtggtccaaattgtaatagtatttctcatatgtttgaagattggttggttggagtggattctaagctaaaaagctttttctattcctttgttttttcactcctatgattcaaagaggccttgtgtgtagacctgaaggactaaactgtccatgccgctacctggctctttgtaacaatacaaatgatttggtgtttgacaattctccgattaattaaaggggctacttcaaatcgtacatattttttaaccaatgggatatagcccgttttaaatcaaataacaaaaagaagataagcatgtaaaaaatcgtaagtctaaagaaaaaatgttctaaattctaattttaatgcactacaactaaatgcaagtgctacataactatgtgtaagtgctatgtaactgagtataagtgctatgtaattaattataactataagttaaatatacgagaatacgaatcctgatgcaagatcctacggataaaaagtgaaagataggagacaaaagtatatcacaagtgaaatagcaaaaaccattaatttaatcttacatataggtactccctccgtcccacaatataagggattttgagttttttgtttgtaacgttttaccactcattttattcaaatttttttttgcaaatataaaaaaataaaaaattgtacttaaagtattgtagataataaagtaagtcacaaataaaataaataataattttaaaaaattttgaataagacgagtggtcaaacgttacaagcaaaaattcaaaatcccttatattataaaaacagagggagtactttatagaggaacatactgcattaagtttcggagccattttgtgaggacaagaacaactttcaattggcatgccgaaatctagaggcgatagtcctgaaaatctttattaattatggatagagatttagtaaataggattacgtcctaaacaatatcttttcatccacgattttctttttatatgttcttgtcttttgttttgacattgcctttttaacgccgggtttacaccattattaaaaaaaaaaaactatccctgctaattgtgtacacaatgttcctttatgcacgtgcagtcaatacagagctctttggtctgcctgcgtgtgcgccggacgtctgggctgaataatgataagcattgtgttgtgctgggctcaagccagtgaaacaaagaggcccagttaccacatgggcttagattaaccagatcagctgcattatgttcagctacaccaaggtttcgctcgattaattcattactactccctccttttcagattataagttattttaattttagttaaaattaaattactttaaatttaactaaatttatacgtaaacatagtatatttataataccagattagttctattaaatcgataattgaatatatttgtcttggattgagaatgttattattttttttatggatcaaacttgaacactttgatttcgatcaaagttaaaatgacttataatctgaaaggatagagtagctccgtggacatgcacatagtatataaatgaggaataagttcatctaaggtcccttaacttgtcaacgaattcgattttcgtccctcaaccgctagacacaacgggtcccttaactattaaaaccggtgcagatgaggtccctcggcggttttgaggacagttttggctgacgtggcgcctatgtggctaatttgactcggtcttcatctgacatggcactgacgtggcgcttaagtggcaattcgacccaaaaaataataaacccgtgggacccacatgccagttccacacataaaataattaaaaatggtgggacccacgtgggccccacatatcatcctcactcctccctcctctctctctctctccggccgatggagcggggctagcgactggcgaggcgagcgacggccggtgcagcggcgcgacctggcgaccgggccgaggcgacggcggcgcgagccgtggcgacgacggtcgggcgccggtcggcccagcgcggcagcggcctgagggcggccaggcggcgtcaggcgaatgggggagaaggccggcgcggtgaggagggagcttggcggcagggggaaggacggctgccgctagcggcgctcggagcgggcggcgtcggcgcagccgtgctcggctaggcggcgtctgggcggcagcttgccttgcctgaagaacaaattcaaagacaactcactagaactgttgtattgatttgctacaagaacctgcatgttttgagtttctgcaggaattctggaggttcaattcctgcaatgctgaaactcctcaagattcagttcaaatccaaagtggggaagaagcaaagcgattcgagaagagcggcaatgtgggtcttagataagcacaccgagataagaaaaaaaaatgaagaacagaagcagaaaccaaaagtcaggccaaaaatcatcatcatcgcagtggtaactctttccggcaagagaaagatttatgcgcattgactaatactagagattaacatggagggaaggggggagacgatggtaggtacctaacctcagacgttgctgcttccatggtgatggagctccatcccctccaaaatttccaaagcggagagcctctctctgttaatttggagtttggagggagcagagcagaggcaaggcaaagcaggtggactgggacggcgggtggagtggggcgacggtggccggagcggcggcgcgcgaagccagcgggacagccgctcgccggtggccacctcaacgatctccagccgaccagcccatccacttgctttggctgctaccaccattgttttgtataagaggcagccctacccttcaccggtgagagctccacgtctccaaccaaaatccatcgtcttcaacccaacccaaaccaaacaaccatcatgagcagggggagcaggctgagctggatgtggagggcgccggcgagggcactggggagtggggagggcgtgggacatgtacgtgagggggctgacggggtgtgcgcggtgcgtgccggcggacgccgcgttcggctacccggtgttcgtgccctcctcctccgccggctcgatgggagcaacagcttcgggtctgactcgcggtttggcgccgacgacgacctccgggaggcgcgcggcataggcggaggagacgtcccatggcgccgcttccgccctgtggccccgtgcgccgccgaggccccgctcccgcgccgccgccgccagtcacggtcgcttgcgccatggggccccatgcgctgccgatgtcccgctcgtgcgccgctgccgccagtcacggccgcttgcgccttggggccgagcgcgccgccgacgccctcctcgacgccgccgccgcttgcgccctgtgaagagatgggagagagatgaagacgacgggagatgggggagagaggaggggtgataatgacatgtggggccacatgggccccaccatttttttattaatttatatgtgaaactgacatgtgggtcccatggggtttattattttttcggatgaaattgccacgtaagcgccacgtcaataccacatcagtcaaattagccacatatgcaccacgtcagtcaaaactgccatctaaaccgctgagggatcttatctacaccggttttaatagttaagagatatattgtatttggttttgggctttaaagacaaaaatcggattcgtttgatgaacttattcctataaatgactgcctatgccaagctccccaaccccaaggactgtgcgtgcatgacactgcagcctgcactctgaactctgaactctgcagtagtccaaatatgcacactacatgtgccacatagcttaattacacctaattagagctcgcttgatcaaactaggtctagtagacaaaaggaatgcagttgatcggatacaatggttactaacaacgacagtactgggacaaaccttgattaattgccacagctttcaatatcactcacccttgtggcctatacctgctcttaatttgatcctctcctcccatcccgaatatataagaaaccaagcaaaccagacatgtagtccatgcgatccaacaaaattctagtacaccagcctgaaaggagaagaggggaaaaataaggcaaaaaaaaaacactgatcatgtactacatttgtacacacacatgtgcatatatagcactcaaatcttttgtcgatgatcaatggggattaggagtcactgggaatcgaagcaccaccaaaaccaaaccaatcggctgctagtaagatgcttgttgtgcccaagggaatggctcatctaggctgtatttgtcagctggttgggtggcaatgcatgacatcccagaagagccgcgctggacgctggaagggaagcgtacgcgcactactcctctgccctctcttccatggcgtggatcgatggatggctagtctattcaagcttggtcgttgttcggggaaatggcatgcatccactacgatgaccgggtacacatggcttctccccctgctaagcaatgatttaaatagcggggtaaggcatttagcgattggcttctcaaacagctatatcggtagctatagcgaactaaatggagctatagcggctaaaatgtatatgagaacaaatagctagaacccttctcaaacagctatagcggaagatagcggcagctatagcgggacatttaaaaccctgttgctaagaggttgttcggttcatcctcaaaagagtgaaagtgaaggggattgagagattaattctacacctgaatagatgtgaaattattccccttcgaatcttccgcaatttccttgtaggacggattaaacgagcaagaacaaggcctaacatggtgtgtagcctcggctgcggtagtacttgtgccatcaagttgagcgctctgctctccgctgtcctgtatggctgtatgtatgtgtgtgtatgctcgacgacagtgaacacaactctgcaagttacatttggtgctgagcactgcatatcctgatcgaccaggagggacatacatttggtgccttggctgttgtagagatttttagtttactctaccctcaaatggttatgagccatccatttctttgaatctaatggatcaaattctattagatcgactacattgactgtatcactgtagtacgggcagtagaaattttgtaagggtaaaatcagaaataaaatatatgttaatataataaatttgtttctcatatatcatattaaaataataaaatagatgacaaacttgtacagctcatgattgtttccagaagttaaggctcagttctttgagatacataggctctaatttgatttacattattaattaaacagattgttaccacatattatctgtttaattatagaaacagattggatattttaagaaataaactaacaagtctaatcaatgctgtacaagaaaatttcttacgaaacatattcttaaagcatgtagcaaatcatgattttaataatccgatgaatgatctgaaaagaccaggccgccatgtgctcgcaacttttttttttaatcaggaagaagattacattttagtctctgaatgcctaccataatgtcagcaatgtacatgaaaaaaagtccagcataatgtttggggataaaccctattcgtagggtgttgtcttaactagtctaatatatattagatatcttaaaggtgctggattagctggtctccgggcgatttaggcaaccggcatccaatataatcttgccacgttgtttggttacagtggatcagctaccaggctagcttatccttccatgggccaactgatttcttagcccagtggtcgacggccttttagtggtcatcgcagcatcggtgccgtggtcttccaccgtcctggatttcctgtgcgctgatccatctgcgagtcgcctctatcctctcgacgcgtgtcgtccttatccagccatcagggacgcctccaacgcccagcggcccagccccacatggtggcccctctctcaatctccacggtagtgctctgccatggagtacagtggcgatggggttggctgctgctctgccatagtgtacggcggcaacgggttggctgctgctcgctgctccactacgcagagaaccccatgaggaccaagggaggtaatctgcatcgctcccttctttcttccatatatgacgccggttctattccttgctcctcccgcttaggccctgtttttcccatccattaaaagatatctttaaatcctagctattcattctccctctttcatttaatcctaacccttcattcatttcccaatcccaatcccaacccccatttcccattatccaaacacaccctaagttcttggggattttcaaccggtagtttccctaatcgcatcgtctctactgctctgatctttcttgctgcgtctcgctctcgatttcccccattgcgatgccaatgttgttccagccatgcgtgtgctcactgttttttttgggtgttttttcccttccaggctgtgctcttggattggtgtctcttccacatcgcatcttgttttggggggagggaggggggcatctttgcctccctcagctactgctcactgaggtatataagatcagctggttttatcacggggatggacgttgagttcattacacgtgtggtgctatggtatatagataaactgagatggttatgtcactggatgtctgttcgcttgatttcctatatatggtgttcctctgtttttttttcgagacagtactttccctaatcgcatcatcccgtacgctctgatcttttcccgttgtgccttgctctaggttttcccattgtgatgtcgacgttcttccgaccatgtctatgctaactgaatttgtttttttgttttctaccttctaagttgcgcggccaacccttaccgagacgtggttttgctgcccgccgagccatccacattgctccttccacttctccgcatccgctcgtcgtcctcgtcctctccgcatccgcatctcttcccaatatttttgttcttcactgtagctgcacgtacagcgagcttgaatggcatcacatactccccatcccgtcctcagcatcggcgtcccacatggcatcgcaacgtcgccttcttcttcggcatcaggtcaactcggtggctcactgctagcacagatggcgggcggggagtggatctttcagttcttcctcagcgacttgcccgacggtgttgctagctgacgcagccatttccgcaatggcagaaatcggtgtacgatctacctattctcctccggtacagtctcccttctcttatctctcatctaacatagattcaagtggttctgaatttaggctaaatttatcagatgtttgtttgcgaagttcgtttcaagattcggatagaacccaatacatttccgaatattggtgcctcgagatttctctctatttttttaattttgccttctgataatttgaactctgagccaattcctctaccctctgatggaaagagagttgatgtgatgaggcaagacaggaactggtgagcttccctgaaacctgttgattccctggcaacatagatgttttattaggatgagttctcacattaataggttccttccattagggcttttaatgttctaaacttttgattggtgacagaagttacaattactctcatcctctcctgcgaatgagattctattcatttttctgttcctgtattttaagcatgtcagtatgccactactttgttgtccaaaactgaactccaaataaaggtcaaggtggccagcttaggattgaaacaagtttagcagaatctttttaaacaaattatttggtgtttttcagcatacaggtaaacagacggctagacttcatgataattcatgctaatgttgggaggggcaatccactatgctcagctcatggatcttcaggaatggagctgccagcatataaatgacaaacaaatacaaggtaaataggcagaagagatccttcatgtgctttgctctctgatgttctccttagagaaaagaaaagttaatccttccaattatttatttttattcattgattatatgtaattagtaaattgttgtgttgtatatgtattaccattttgacaaaaaaaaagaaagagcactccaattgataattttctgaaccatacaggaaaaatactccatgtgcagcaacgattaatgcttttgtatgagctgatcttagtctctgaagactgtgctgtggtcttcatctctgaaggctaagctgtgttaggttggagcactccgattcaactcttttgcccaccaaactaactaagccaattgagtgctgcaaagcgcaaacagtatggtctccatagcctgtgcagatatagctcttacattggtgttctgccaccataacactgccaaagctgtttccaagctaaaaatcatgctgcagtgatgattcaatcccacacttgaataattgttgtttcctgcactgatgtagtagttactgctttttctcacttgcataattgatgtacttcactcacttttttatatttcataatatcatatagattctcctcaaggactgtaacaagattgaagctcatgcttagctggaaaaccatttgaaatacctatggaattatccctacacatgtgttaaccatgatgatcttttcttttcgaaatactgtaaggcaggtagatccatcatctttgtcaacaacaactgccttagctatactagaatacgaggggcatctaagagaaaaatacaaatattcaagactctcatactagtttggtaggtgatgtatatttgtttcttacatttacatcgtccattgattcacagtggatacattacttgttgcatttagatgtctcttttcaggaacctttatatttaagttcctttacatggctgttttaagagtccactgctttgattagtaacataacattgactgaaatgaggatttgttcattaatttgacgtttcttctactgtctcggtaacatctctccatgtgctgacttaattctccaaactttgagttctactgacttagtaacatctttcaatatgctgagttaattctccaaactattaacttaagaatgatttaacttggcacatatttttcttagtgttcaagaaatgattttagcagatgattgccattgcatttggtgatctaaattgactaaattgctgaggcagatatgtttcttgcacagaaagctctcatagtgaagagtcaagtctcttcgtaaaactaatgaatctgaaatgtagtcgttttttcataccataattgataaatgcactactgttgtctcatctgactgggtttttggccagttctagagtttacaggtattatcttaatactgcagttctcgcaaacaaaattacgagaaatttaaccatgtacctttttcagttagttgacagaacgaattgcatcttgtgcccatagatattggatgaatcatagtatgcttgtcatccctgctatgtattgtgaaattattgtgaaattattttttaaattattaactatctagaactgtttctgggaacttaagttattaaaaaaactattcaggttaaataatgttcttggtaggtacactaggaattgagtattgttagtaggtaatccacttagacaaacctttgcattaatcgtatatttctttctatgtgttacagtcttacatgctacaataccgcgcagcgtagcgcgcgagctcactctagtatatataacggactaaaatgtttctagaacaatgccactctaatgtacagaatagagttaagggcaattatgtaatttctcgttacatatgaataaaaagaaccccgagaggtaaaggtggagatctccattcattctatactcaatccactgtcatcttcagtttccccctctcctccctactctacactagcaatgactccctctcacaaagaggagggtccttatctcgttgggataatttgtttcaacacataggatacaagaaaatccatagtagatgacatgaagagaagaaagatgagagtgtacacacaatgttattctaatattaatgggactaggaggcgctgggaatcaaagtatcagctcaaccagactaaaaggcttcagccagacgtctcgccgtgccaaactgatgggattctttgagcacagaacgggaccccgtagagtggcctagtgcttatcatccttgcgacatctcactcgacgctagagcagataaagaagcgcacacgtcggtcttctgccatggcatcaatcgttggacagcttcccagagctttggccgtcgctccggtcttctgccatgacatcaatctttggaccgccggcgactggccttgttctgggatgaacttgaacagatgtgggatgtggcttggcacgcataggattgctaggcgaagacgtcggccagaaaacacggggacaaattcgtggttgtatttcggtgatgagcgccaagctattcaattcttcctccaatttggctgatgcacgttgtccagtgatgcagttaatcttgtggaattgaaaaattaatttgggagaaaattaaatatgaagcatataacatgctctatctaaggaacaattgtgcatgtgaactttggaagttgaggggggtgatctgtctatatgtttcggtaaatgttgctcattggattgaagtgcaatgaagcagaatgtgaggatagctagactgcacatggtggaattgaaaaagatcaggaacaacacaattttttttgaggggaaagggcatgagctctgccaatttcatttaaggagagaaagcaagagtacaaacaacccctaacaagttaatgggtctagatcccgtcgacatttggcggggaagacaggcaatttttagggaatgtaaggcaacaagcatcaaaatacgtctgaaaatcatctaagtgacatgagcttcatcaaaggacttgcacaattgtataattgactccaccacttgtgagaccgtgttgtaggtgccatgaaagatcctgctgtttctttgcaaccaaattccccatgtcgtgtaaatgatgaggccatctaggtttcgcctttgctctttgacaatttttttcctacaagaatcccaccatgccaagatatctccattgaagaggcttgtggtcggcatttgtaggcccagcttggaccaaattgagctccaaacctgctttgcgaaagcacattccatgataaggtgcctagccgtctcgagttcaatgccgcatagggagcatatcgggctgttatcccatccccttagctggagtttgtcagaggttaggatttttttttatgtaccataagccaagcgaaaaacctacatttgttttctgtctttgccttccagaagaaatttgctctgttgtcctgtatgctacctaggaattggattttgtatgccgagctagctgagtatgccccattcggcgtccatttccaggtgatggagtctgttgcgctttcatccaggtggacttgttggattaaaccccaaaggagaatgaactctcttacttgggtagtcgagttcatcctcctcataggtctaagccatctgttatcctgtaactcctgtgctactgttctgttttttctagtcaccaactagtagagggaaggcgttaattcctttggtgaggatccctgtagccacctgtcatgccagaatttggcttttcctccgttccctaaggatatgatcgttgaggccctgaagagttgcttatcggtctcatcacatggtagatttgagcccttccatggtttatcttcatccatccattcctgccggagccatcgaaggcgaagtgagcgaccaaagatgtactgttctgaacaggatgtactgttctgaagattctgaactaaacttgctgcaccaagaatccaagattgtgtgacctgtgagtggtgctcgtatgaaattgccttgagcagaacagcttcttgttttcgatgaaaatctggaaccagggttttgccgttttggttctggaaatcagggaataagtgaagagcactacagcagtatagcgctagctagctgctcaagggtgtttcactccttttctcataatagattttcttggtagcactttctttaacgcaaatactgtatgaaacattcctacggtgcaatgttataaatatcaacaaaactgtagggaaaaaaaacagagttatttacaagttgtttagccatcgtgagataagaggaagatatatagcttttgctctatagataaccatcgtaaattccaaattcttccacatcaaagcaaacacaagaagaaggaaaaactacattcattcgcttcaaaccccgtcaggagtggctgtttcggcacaagacaaggaagaagaactttttagatttttcaaggagagattggggaccaatttccaaagaactttaagtctaaattggtctctattacatttattacatttaccttcgttggaccttaatgagctagaagaagatattacggaggaagaattaaaatccataatttttgatttgccccctgaaaaggcgcctggtcccgacggcttcattggggcatttttcaaaaccgcttggaccacggtgaaagatgatctcctcacaacaattttatcctttatgcatctcaacacttctcaacttgcagaactgaacccagcctttatttgccttatccctaaaaaagatgatgctacaggcgctgatcacttccgtcccattagtctcatgcatagcttcgtcaagattatcaccaaaattttggcaaatagacttgctcctcgactaaatgaaatgatctcacaaaatcaaagtgcttttgttcataaaagggcaattcatgacaattttctgtacgtccaaaacatggtgcagatgcttcatagatcaaaaaaacagagtctattcattaagatagacatagcaaaggcattcgacactgtgaattggccatatctcctggaggtccttcgtcatttcggctttggacatcattggttaaattggatctctaatctgttttccacctcctcgtcccaggtgctcctaaatggttccccagggatgagaattaatcatgctaagggactccgtcagggagatcccctgtccccgatgttgtttattgtagctatggagccttttcaccggatcattaaagcagcggagagtgccaatgtgttagccctgattggtgtgagaagtggcatattcagatgttctctctacgtggatgatgtggcagtttttgctctcccaaatcccgatgacctgaatgctctttctcgcatcctttcgtgttttgcacaaatttctggtttacattctaacatcaacaaaactgagattttccccatcagttgcaatggaatcgacatgcaacagcttcttgccggttggccagggcagatcaagaatttcccttgccgctacctaggcctcccgctccacttcaggaaattaaggaaaattgatttccttcctcttatagacaagatcggggccagactaccagcttggaaaggtcgcttctttacctctgcaggtcaccaaaccctagttaactcggttcttagtgctatgccgatgcatcatcttacagtccttcatgcgccaaaatgggtcttcaaaagaatcgaccgtttcagaagatcttttctgtggaagggcgaagaccctgatcattcaaatccaagtgatagtctagtcaattggcaaactgtttgcaaaccgaaaagcttaggagggttaggccttccggatctggacaggttctctagagcactccgactccgctggctctggttcaagtggaaagaagttgataaaccctgggtaggcatgaatgtgccttgtgatgagatggacacaagactctttcaagcggcaacgacaataacgattggtgacggagcaaaaactagcttctggcatgataattggatccaaaaccgttgtttaaaagatattgtgcccagttgttttagcctggcaaagagaaagcaaagatcagttcagatggaaatgcgagataatagatggctcacttccttcagacaattcacttccgtggaacaaatccatgatttggtacagcttggtggattactccaactggtttcgctttcccaggatcctgacaacatcaccttgaattggaccgagtctggcgtctacacaacaaagagtgcttaccttttccagttcgaaggctcatttgccaccaatgagtttgattctctatggaaatccccgactgaaccaaaaataaaattctttggttggctagttctccatcaaaaaactttgactgcccaaaatctgctccgcaggcattggccttgcaattggatatgttgcctttgtggttgtgcctttgaagatacaaatcatttgttcagttactgtgtgtttgtcagaaaagtgtggaccctaatttgtcaattccaaaacttgtcttcggtcggaataaatcctgtcctggatgtgtcaacatggtggtctagaaccaaatttgcaggctctaagaaggatgtgcagctggtcagaggaactcttctaactacttggtggaatatttggttggaaagaaatagaagaattttccaaaactcttcctgttcagagattgaagtagcttattttatcaagcaagctattgatatgcgcagcttggcctttaaacccccatgaattttttttagcttttcctgcagctgtaattctctttccattccttggcttgtaacctctgaatctctgtgctactttgtaatttttctcttctaatgttaaattccggcagatctcctgccgtcgttctcctcaaaaaaaataaccatcgtaaattcttgactaaaacgatcttgacagactgagaaatggggagtgatgtttctaaagattttgttgtttcttggtagccaaaagctccatgccattgcgattatgagttccatatagaaggggacttgcaacttgattctcaaatcttcaagtgcctcttggactgatacattcctcaatcttgtagggcagagagccagagatcccagcattgctgtgcaaaagggaacctgaataagatgtgttcaagagtttcttcttgattaagatcacacataacacaattgcaatccagcctcacaattttttttccttctcagcatatttgttctctgttcaatctatcattgagcagtagcaagaaaaagacttgtcttgtttaaaccttttttctttttacatggaacatctctttgttccctgatattattattttttgcatgaaaaacctactaatttgcaatcggtaataacacctcaaagatctcaagatcaattttcatttaattagatgcccagatttcaggctctagtaccacctacttagatcggtggaaatattgtctcgtctttacatctatccatcagctagctgattaatatgcagttggtgcgattagatcatgcacctttatctcccatctgtgcttatttctcatcatttttttcagatcctttgaagctagccgaaaccccctgaagctatatactccatatcagagccactgcccaaatcctctccttgttacacaacccacactatacgatgaaacagatttcaaaaaaaggatatgcttgattaaaaaaaaaaccagagaggatatgcagagatacaacttacaagtggtaaaacgaggggcaagagtttatagagtactcgacataatactagctccattttaacatgggaatagtaggcgtcggaaatgtagctgttacgcagagggagaattcatgtaggatccccttgaaacctggcacaactaataacataatttcgtgcttagtgagtgagctgagccgtaggccgctgctggtgccgagaggccatgccggacagagtttggagagttgagcacgattgttgaggatggaggttgcagagggggcctagtgcaaaatccgccttctgcccctcaccgagcacaagatgagagcgcccgttggtccaaactaagaaggggtataattgtctaatctttactcccttagttgttccatgcggcggtgctataccaccaccgcccactgttagctccacataactagtcctcccccgtctcaaaatataagtatttttagaatagtgccaagtttttaaatcttgactactaatagcaaaaagaaattaaaaataatcaatcatgtaaatttgatgttagatttatcattaaataaattatcctaatatgcaactctttttatttaaaccatcttacttttataggtattgttagttaaagaagcatctcgaagactgtgtcgaagttaaaaagtgcttatattttcggacggagcgagtaaaatataaaagtggaagagtaaaactggacattttaacacaaggttggaaatacatttgccccttgccggccgggactattcgtgagtgcgttgaggcactctcgtttccgatagcgaacccaaggagccgccgccgccgttccagtcaggataagagtaggtacaatagcaagctataaaccaactgcaaacatattttaaggaaataaataaggagagagaagaggagcgggctatagatttatagccagctgcaacacggactccaagatgcgatgtatgtatgacagttgggaccaggtattaatagtgtagtatgtaactattgtatgaatgagttattagattggctatagataaattggagctagtagttagttatactattaaatttgctctaaatggattatttcgttaaccgttcataacgaaaaggctagttagggcacccacaatagttatctataagctctctataagagatccatgtcagcatattttcctatttggaagagattaaatgaagagagagagcaaagctatctactaacatggagatagtctatagagaaaaataaggcaatggattagagagctatagatacccatgtagacataccattgaagtggtttactattaatctagtctattgctgagatgtacatgttttataaatagcaccttactttaccattgcgggctctcttagcgatcacccgagcatcaatcagggagtcgcgcgtgatcaccggcctttccttcttcttttttttagcgcgtggcattaaatctgatttttgttacaggctttccgggttgcctatgaatgccctcaaagaatcaagcatgcatgcagcaatgccttgaatctatcctccatgatcatttgtggatctaaataacaccgattttgatctttagcctttggaccgaatattaacgtcaaatttgatcttagcctctatgatttgtggactgaaaataacgacaacttttcatatggttttttttctcaattgtttgtacataaataatttgcatgcataaagtttatatatagaaagttatgcgcaaaaattgtacatgcagatattgttgaaaaaaaatattagtggacattcatcaataaccaaattttgttataattatctaacaaaaaaatcaaattttgttataaaagattttgtcatctttagaatgaataatctaatagaatttatagtagcaaatagtttttcatacatagggttgaaataataatggtagaagaaactgatccagtaacgttgaaaacttgaaacttagctacacaggacgtgagtaagggagcaattccaaccccaccctgctcataaggccaagaagtttttgatggtttgagcattgagattggtgcttctatatgacagattgaaaactagtccctctattttttgatcgatatgcaattcatgctagctagtacagaggaggagcatgggcttgatatagaacgtccccataggtgaaagaattgtccaaaccatcttgctggccattccaatccatgctattcgaatatcttgttagccgcactcgtgatgccactcagtcccggtttgatgaagcgaacaagctctaatatatatgcatgtctattattgctagctagtctgtctttttcgtcatccactagactttgaacatatgtaactacggagacttttagtttgatgtcctaccacagctttggtaatgtcaaagtttgggtaagatttggtactatcaaaattttagtaagatagagttgaaaaggtaggtttggagtgtgcctataagaattgtggacaacatcaatattttggcaaatcaatgttttaacggaggtgtttgttttgttacccctaccaacaattaaattgtaatagggttccaaatcaaaatggcctgcgtacaaatttgctattctaatatttgggaggagaggataggaggggtaagtatataacaattgtgcggaggttatggtgactcaaggcgagtggaaaagattgcatttatggctcgatccaatgcaataaaaagggcaggttataagggctcagttccgctcacattgttagccccaatcttgtttcagctagaaaaagttaattaaattgttttttttgcgaggtaggcaaaggttaatttagtgagatgtccatgctttttttttcaataatggaattcgatttagtctctacaagtcagttatccatacctgcacctatataaatgatctatgcatcccgtgctcaaggaccccaaacacaacgaacatacatgtactttgcctgcattccaaaacatgtagcacacaagatatgatacacagtaaagacctgattagagctagcttgatcgatcaaactgggtctatgggtgggagttactgggagtgcagtcgatccaatatatacaaaaattggtggagtcgggtcggctgacacaacaacgattagagccccgatcgtcataattttcgtcactacgaacacactcgcctacgcatagacctatagtcccgattatttcaacttagtcccggattggatgttccggtttgtaacccgggacaaaaggggttacaaactgagattaaagataagttccctagcagtgttcggcctaggccctcttacgaaaatcaatttactgatgtgctctaaatgttgtcccatttttacatccatacatcaactagatcattagtagttggtgcagttcatgcgcctaactcctgtctgtgcttatttctcatcatttttagatgccctaaagctaatcgaaaaacaccgtcaaactatatccagaaacatatatagtctacctctccttgttacacacccctcactatacgatgaaatagtttcaagagaattaatttctaagatatgcaagtgttaaaggagggccacaacaagctctatcttgccatgtgcagcatgccttttgcaagttagagttcatgttgttcatgacgtaatactatagctagcttcatcgtttaattaacattggaatagtgggcattggaaatggagctgttagagatacattggatttccgtataatccactggacaattggtaaagctgataacatgattgtacttagcgagggggccgagtcgaaggtcggtgctggtgttgagaggccatgctcaaggaccccaaacacaacgaacattcatgtactttgcctgtattccaaaacatatagcacacacaagatatgatacacagtaaagacctgattagagctaagcttgatcgatcgaactaggtatgtctaggggtgtgggaggtactgggaatgcagtcaatccaacatatacaaagattggtaaagtcgggtcggctgccacaacaacaattagagccccgatcgccataattttcatcaccacgaacacactcgcctacgcatagacctatagtttagttgaatggctgagcacgtacggagggaatacatcgttcaccactctccgttgccgattgcagtgaaggggatgaccggtctatccacagtggttgtttgagatgtgattgtagggtagccaaatttgattttttttttttgttttaagttagatttgtgatttttcttctgttcacttgtgaatgaatgaacatgggattctgggatgtgatgaactgatacgatagcacttgtgattaggatttagtttgtgcaattgtagtaattgagccggctaataacttctttagtgcctccgggggcatcggtgcctgttcttaggaatcattggtgttggtttggacacttataaccggcatctataaacactataggtgttagttgtgtaactggcaccgatgatgtttgtcatcaacccgcctaaggggtgccggctggaaattaaaatctagaaactatgaggatttctccatcgacaccaatatgcttttccatagtattgcctagggaccttggatatactctgtcctataacatgccattggaaatacaatgatttctttagttttttacttatgtttatttcactcagaattaactaaaacataccactgaaaacaccatgagctttttcatttagtttttatttttctgaaatttaataatttctagatatgaaactgtatacccatcttgggctatcacactagtacaaaatgatttttgtgaatacccctttagttttacaagcggactaaaaaaatacctatttgtgaaaattcactgacgatattccactactggagaaccgatctttgcccggatggcaaaaatcacattcgtcccggtttgaataggaaccgggactaaaggatctttagtcccggttcaaaagcccagcggtactttttgatctttagtcccgatcagtaacaccaactgggactaaagataatttttagtcccggttcaatagctgtcaggcccccaacgaactttagtctcagttggtatcacgaatcgggactaaagatcatatctttaatcccgacatctcttgctctctctctctctcttacttatctcctcagcatcggcaaccgcgtgcacgccttcttccttatcccctcctcgtccacccctctcctccgatcccctcctccccttcccctctccctctacgccgacagcgggcagcagcagcgccctcccctctgccggaggggaagcggcaggtggcagcgcacggctcgctgagggccctccgccggaggggaggcggtagtcgccgggcgcacggtaggcggccaggtgcgcgcggagcggaggcggtaggcggcggcgcacggctcgttgagggccgtccaccagaggggagacgacagccaccaggatagcacggtgtggcgggcgcgctggccgggatggtgcgatgaaggccagtgcaggcggcaatgacactggatggttttgttgatgattttgtggatgattttgtgatgtaaatttgtggatgagttttagatctttttgtgaatttgtagatgattttgtgttgtaaatttgtggatgatttttagatgttttgtgaatttgtggattattttgtgaatgtgatgattttgttgttgagtcggttcgaaatcaatatgcaagcagaaaaaacattgaaaaataaaagaaaaaaacctttagtcccggtcccggttggtaactaaagatggtagcgccagccacgtgacgctaccatctttagtcccgggttatttcaacctggactaaatatgcccatctgtagtcccggattggacatcctggtttgctacccgggactaaaggggttgtaaacgggattaaagatgaggtccccaacagtattctgtgttcggcctaggccctcttgtgaaaatcaatttactgatgtgctctaaatgttgtcccatttttacatccatatatacatcaactagctcattggtagttggtgcagttcatgcccatagctaactcctgtctctgcttatttctcatcattttcagatgccctaaagctatccaaaaacaccgtcaaactatatcaagagacacagtctacctctccttgttacacacccctcactatacgatgaaatatatagtttcaagagaactaatttctacagagatgcaagtgttaaaagagggccacaacaagctctatgttgccatgtgcagcatgccttttgcaagtcagagttcatattgttcatgacataatactatagctagcttcatcgtttaattaacattggaatagtgggcatcggaaatggagccgttagagatacattggatttccgtaggatctaccagagaattggtacagctgatagcatgactgtacttaacgagggggccgagtcgaaggtcggtgctggtgttgagaggccatgccattgccgggcatcgagggctcagattggagcattgagcatggcagcggctgaggatggaggatggagagggtgtagcgcacaaggtgcctccagcccttcaccgtgaacaagacgtacgacatcacccggcagtccacggtagcaacgcctccatgccttgcagttgtgtgttgatcttcgtttcgagtccagcgcatatgcaacagaaatcttgtccaatggcagccccagaaaaccacaagttcaaatgtatacagatttaggctgatgaagttaagccgatgccatgatgtgtcatgtttatcgctcattacttgtgtaaagtaaggcaaagaattatataaagccactagagaaaacctcaacaagggatgttggggaataaccccatacttagagtgttgtataaactaatgtataaagaactaaaatacccccaagaggaggttgtacatatatagcaaatcaagggtaagaatgtaatttcccgttacatatgaataaaatgagcccttcaagggcaagaggagggggatctctccccattctatccacctctctcagccttcatcccctttctctatctcctcacaggccaagcttgggctcgctccctttggagggaggcccttgccatccttgttgcgctttgttccaacaatggacataaccctcataagatgcaataaggaaaacatgcatgaacccaagtaataaaagaagttatcattacttttataacccctatctgtaagatatatagctatgggctatgaactaatacaatcttttctacttaccataacctcatcagccagcataattattatatacctaccctcctatcctctcctctcttaaatatgtagggctattttggtttggataccctaataaaatttgttaaaagggtaacaaaacaaacagctccattagaacattgatttgccaaaattttgatgtttcccacgaacttgtttcttataggcacattttggctttaaccaaaacatctaggggtgggaggtactgggaatgcagttaatccaacatatacagagattggtggagttgggtcggctgccacaacaatgattagagccttgatcgccatgactatcatgaccacggaggcagtcaccctatgcatagacctaactgatggctgagagcggagagaatgcatcgaccgtagtggtggcgtacgttagtcgatgacgatctatcactaaatgtatgccgtttctaaaaaataaacttttttctcttgtactttaattttctaattaatgatactgatactgctcttgtatgtacatatttgaagtaaggtatagtttccaatatgaaatcctacatattcacaaagcaaaccatgtgccagttccttcttatggccttcatgacgagcaaaccatatcaccacagttgtattacacagacaatgttctctgtcgttgaagttaagccaccatcatgatatacccttttctttaacaaattggccattttcaaaaactttttttgaaactagtccttgcaaaaaaacttcaaccaaaaataggccgcgaactcagcgccatggatcttggcactaagctctaatccgaggtggcatgaattttctgactcatcattgataatacaaagtttctacatatctatacaaagtatatacacacgtatatatatttttaatgtgtacaaaaaaatgacgtataaaaaatatacatgtatataaactttgcatatacatatacaagctttgcatacgtgtatacaaaccttgtatatgtacatattaaaaaccaagagaaaaaaacacgaatacaaactttgtatgcatacgagtacaaaacttggtatacatacaaatacaaactttacaaacatacatcttaaagaaaaccggaagaaaaaaagaaagagaaacccaacaaaaccggaaaaaaccaaaacagaatgagaaaccgaaaaaaaacaaaaaaggggaaaaactccctccgtgcggcgcgccgtccaccgtaccctctccgtgtgcgacacatgtctagtcgcgcaggggagggcgcgcgcgactggctgccaattagcattttcgatgtttggtggagctacgtactaagacagggcacggtcttagtactaaccatgtactagagtcgttgtacgcacaatgtctagagtctagatgtcttggttgagtaatgatatgcatttctacgctaggctcagaccggtgcaactgtagttgaccaaaagacccgcagcttgatggttcggtccatggcatggagatttgtcctggctcagacacggcacggtatgaccaaccgttgagtcgtgcatggacctcttcttcaacatggcgtgccggcccagcatgtcatggcccaatgatccccccccctctccccccccccccctcccatggccatagcctatcggcggctagctgaaagagatgagggatgaaaaaatagacttatttctatcatattaaggcagtctgcagtttagatagggcatgcaccatatgtcacacagcttacacctcaacataccttgggcctaggaagcatggggaatactgtagccgggatgcaatatggtcaccaagaacaattgatatggaatatgcccagatcacctcatctcccaacattactcacccttgtgtccaatgtatgaatgaatggcgagcaccaagcacgcagcacaagacattgccgccctcactaatgctgcctacggagacaacaccaagcctaggttgtctttggctctgtaaatcagccccaatccccttgccgctcagcaaggtttattaggttacggtcgatgaaaaaattacgaggctataattatggtcaaggaaaaaaacaacaaaacaacatgatatacaacacggctataagctgaaattaaaccaccgttgtataacattggtatatatatttatactcggtactatttctttcaaagtaaggaagatgttattagatccttaaaggcttgtttagttcgtagccatatattttcacaccaacctgtaggcatgttgcatgtgctacaatttaatatcccggtttttggttggtttgttgaaatttgatgaagctatacatgttgcattgctagtataactaaggacccatatatatatgtgatacactcaattaatttctagctgaatcatgctacatacttgtgaccaacaatctacactttgtgtgcaaacctaacagccagcctccacatccaaaatgcatatagccatggattttgagtttataaaaaaatagtcttaaatcagtacgtacaacatgacttttgagtaaaacatgcactaaataaatatgtgctaattagttttgctgttaaatttgtaaccccttttacggtggactggtagtacgagtcttagagcaggtacaatagtgagcttatagcctgcttatacgattttagcacgtgtggcagagaaagaaagcttgcaaagagagaagcgagcgactattaggcctccttcaatggttgagctagtgcactagctcatgcttgtccacctcatacaagagatagcaaaaagtctacctttttaataggttgtctcatagcacattgttcaaaatgctttgggttccacaacccctctcatattttgtttaggagcttagctcttgaagaagagatagtgcactctctctccttatcttctctctcttctacatcatacaaaagctgatgtggagatttatgagctagctgactcatccttgttggaggaggccttatgtccagctctacacgtgagtctagctaggcactttgcctgccatgggcccacctgccctcacaacaaccaacggaaaaatgaatagacttaaagtaatggctggttagagattagcttcattaaaagatgaagtattcgctgctgttgtatgttgttgcagatggctggtgattgaaggacgtggcaatcggttggagtcagcagtcggcactattattaaccttgctcttatataacctgtacatttagctcgcctcgcctttacctttctagctaccataaccttagcattatttattacacacgctctctgatcgatcctctcttccgaatacaaaaaccaaccacgcagttacatgggatatatactctatatatccaacaaaaactatatacagtagatggccaaaagggtgaagtgaagtaaaatatcgatcaaaagtgtatcacagttgtgtacgtacatgctcattttccattcactgggactaggaggcactgggaatcaaagaatcacacaaaccaacctgaccgcctacaagaacttctgtgttggtgaagaactgctcagacactttgcgtgctgtccaggagccggtccagtggcgcagtgatcatgatgatcgtttggtgtggatggatcggcggatggctccggagagaggtactcgccgttggagttgtgtggcttgtgtccatggagcgagggagctcgcgatcgatcgacaggcgcttgcttcttcacttgtggttgtggacacaatgtataggccttttgtgtctcctgtacgttggccttcttcctcgtatcttctcgttatcttaagaaatatttgtcgctgatgcatatggtattgtatgctctcttcgtatggaagaattagagagtagtagtaaatctgaaacacataacatatgaatgtgtgtatctgagttttggatgtgttgagcacgttgatcagggctgatcagtctatatgtttgggtaaatatacatactgctcttcggcggacgatatgcaagtgctaagagctaggctaagaagtagagttaatatgaggatattgcacaggtggaagacgaagctttgcccagcatcatgatcagcaagccatttcgagttacattggagctcgatcgattgctctgaagaggatgcgttctaaagatggccaaatgggccgcctgatacgggcttgggctgaggtcagtcggaccggcacggcccgacctacatgctagaccatgtcgtgccagcccacgggctgcatacacggcccagtaagactcgggacgtgccgggctggcctgaaggcacaacagctatcattcttctccacagaataagtctactttttccctaaactctataggttgtgtccatatgactgaaaaataagtctattttgtatttctcatgtttttgggccttgcctcatatggttaattaagtgtattttacgtgcctctactatttttcttgatcgtgccgtgccgtgccggcccaccgtgccgagagagcagcccaagcgcggcctggctgtcgggctgggccggcacgagcatgaccccaatcgggccgtgctgtgcttgggccggaccaaattgacgtgacttgggctgggccgtgggactcgggccatatggctatctatacacgaagctgccttgaccagaacggggggcttactagtcacgttggttctgaaagtctgagaattaagtactggacagtagtacagcactagcttctcaatccttattatcttttttttttcgtagagcttttgtttaatccttttggcatgacacagctattaatctgtaatcagtaatggtacctaaaagatctcaagatcaaagtcttcacttaattaaatgcatatcgaccaacactggctcctaattcagatttcaggctctattactattagtaccacctgcttactcatgtgctctgaatatttttcccatctttacatcagtaggctagctctagtgaattaatctgtagttggtggcttggtgcaatcccccccaaccccacacacacgaactatatcaagaaccaaagcctacctcgtctcctctagttacacacacccttcactaatatgatgaaaaagattcaaaagaatagtgagagatacaagtgataaagaggagctctatcttgctgccatgctatgcctgttgtgcaagctagagttcagatagaagccaaacataatgctagctagcttcatcgttccgtataggaatggaaggcgttggaaacatagccattagaaatgcctccgtgttttggtagaatctcctagatatggtacacatgacaatataatgtcgagcacttagcaagatcctagtgctgggaccagagatgccatggcaatagcttgggatgaaggttgtagtatggatcgagcctagatgtgtcgtggatagagcaaggagagggccggccgaatagtgcacgaatcgcgcgcctgcaccaagaacaacacacattggggctgatcgtttgtgctggctacaacaccgcagctgcagccagccagctctatgcaagctgatttgatgtagcagcaacaggacgcagcttgctggctgcaagtacaaacgatcaaagccattgtttgtttgcttgtcagtacatccatactagacatgccttgtagtttgaacatgttctccatttcgagttgagtgatgtcagtaaattaggagacaacagacaagtatatttcactcatccaggcaataatccactaatccctacaggatgtgttgctccgtccttcttatcgcttgttccatgcgcccatcaccttttttctatggcagagaattacatcctagtcgttgtgtgtctagaatatggctgtgtttagttgatggcaaagtttggattttggttgaaattggggatgatgtgactgaaaagttgtgtgtatgacaggctgatgtgatggaaaaggactgaagtttggatccaaagtttggatctaaacacagcctatatatagagcccatagagaaagtctcgacaagggacaataactctcgtgagatgcaataaccacagcatgcaccaaattaatgactatatataaacatgtgctggttactgttgtttcatttcattaaggtacgagggcttcttattccacgagaaaataacaaaaacacattttcattctttcatatactaagggtttttaattaaaaaagaaaatattccatgctaaaggatttgggtccataactagaaagtgctctgcccttttttatccaatgccgatgacctatgtataaaaaaagagaaagttatttttcattttgtatttagtttttcttaatgaaattgaaaatttaaactaaagggcaaatacaaatgaaaacaactttgctgcccatgattgatttttatctagacggaagagtcctcttaatatttaccatcttttccatcctatatttgccactaaaacctcagcatacatatatgcctgatctccaatcctcttctctcatagtatatacagacaccaaacatgtgcttcatgggatcaataaaaaaaatctagtagctgtccagaaagaaaataaaaaggccaagtaatcttgtactacagttctacagacacccctgatccttcactgggactaggaggcaccaggaaccaaagtatcacccataaagaactgatcagctgcgaggcgacgtctcgataatctgtactcagcggatacgctagtactcgtccgggcttcacgagaactatgccaccggctggcatgacgtccggcctccgcggcttctgttcttgcaccgatccgtgggaagatctgctagcgccctccgccgcttgtatatgtggacgttgtgacacgactgatggttgcttgcatttcggtgacaggctcaagaaataaagaacatgaagttgctatctttgtctcggcgaagttactgctctctccgttttatattataagctgttttgatttttttcgtagttaaattttttaaaagtttgatcaagtttatagaaaaatatagcaatatttttatataaaataaacacattatcaaaatatattcgatgttacattttatgaaattaatttgatgttataggtgttactgggtttttctataaatttgattaaaccgcaagaaatttgataaagaaaaaagaataagaaagacttaattatgatatgaaacatagggagtatttctttgtggtcagttatggccattgaaaatttcaagattaaattttttccctaattaaatccatatcaatcatcactagcttgttcttcagatttcaggctcagttaattttaaggagaaaacacgccaatcaacagagcataagatttagggtcattaaaataaatactccatattaggcattattggtagagacctaactgttgtatgagttgtttagatggttggctcttgatgatgtggaaattaggcttagtactttgtgatgggcatgctcttatggttatccataagttaattagcataaagatatagttggtgcaatccttcttgtcagtgctttttctatcactttaagaggttctgaagctagccgaaccaccaaatattaagaggcaccacttatgtatctcctctcctccttgtccggccgcctttcactatacccaacacccagtgaaaaatatccaaaatagcaattaggagatatacaagtgatataaggagaaagagctagctactctatcactccatgcacataccttgtctcaagcttgagttcagatacactactcgacgtatagtaattgtttcatcccaatatcgttcgatataggaatggtaagcatcagaaatccagctgttagcccagctagaaaacagtggagaacccctcttcgtatggcacccgtaatggttttatgtctcgctcagcgagggccctaagcagagtgttacgagggactggagtagcagcggtcgcagggtgtgactataatcgatcgaattgctgatcctcctgcatcgaggacaaggtgacaatagtggaccgtcctccaacgccttgatttcatttggggccttgggggctctccgctcaagatgatcataaccggcgcatacgtttgtctagtagagcaggcacaaaaataccacgtctgattctttggtgtgttgaaagaaagagagggtaagagcaggtataataaacggtttaagcaggcgatagcgcatccaacctggccaaagtgatgagctggatggaaaaaaccaggagagtgggtggtagcggacgactatatcgccgactacacacaaactccaagaagaaagaaactatagaaaaagcttatcccatagttccatgtgggtctatgtgaggcaatgcgtgggtacggattaggcgtaaaaaaataataatcaatttattggtgcttgtgcgtataaccaacagctgtacatacacccatcttctagttatctctatcgctgatgtggtgttttttaccgccggcagtcgcctgtttaattaaacctgctctaagagagagaaggaatgcgggcgacaaaataagcgctagctgcagcacattcctccacacctggtgagccccatttcatgttcagttcttaatttgtgattggtgaaaccatgttagcctgcgcacaagacaggagggcaaagagaaaaggtaggagggagagaggagggtaggacccactgtatagtcaagtgtatagtgaagagattagagatatctattgtagaaattatctctaaaactatctatagatgacatgtataaaattatagcttgtaactaattgtactattaaacttgctcgtagtacgccataaaccaaaaattgtaactcgagactcccgtagtcccgtatgtgtctagcttttcagcaaaattattgattagtgagttctaacatgtgcaaacctgcagcaagttcaggttgtgtttagatacagaggtgtaaagttttggcgtgtcatatcggatatacggacacacatttaaggtattaaatgtagtctaataacaaaataaattacagaatccgcatgtaaaccacgagacgaatttattaagtctaattaatccgtcattagtaaatatttattgtagcaccatattgtcaaattatgacgcaattaggtttaaaagattcgtctcgtaatttacatgcaatctgtgtaattagttattttttcgtcaaactattgatcgacggcttgtgatgtgttttttcctttgtccaaaagcttctatttttttagtaaaaaaaaaagcttctcttttttaccaatactggcatacataaattctcttgcaaacttgttacgaacactgacatggagccacatcgtggctgtgtcttaatttttcattaaatcaaaatcttgatatttttgttcgtatgagcactgctctgcagtagccagtcaatcaatgctatgttattattcatattattggattttcaatcagccgatagcgttgtcctgcagtatgctagttttgcatctgtgatttgaagtcgtgcacccacttctcatagctctactgatagtagaattaatttggaatcttcgatctcatgtgaacaattttgtgagatgtgtgattgttgttcctaccgcgcaagtttttctatggaaaaagtacgaattacctcccgaactatcgcggtcgttcgaattatcccctgaaatacaaaaccggacatccttcaccaccaactatacaaaccggacgaattacccccctcgactcaatccgcggtggttttgatcctacgtggcagtccagtcagcaatttatttataaaaaaaataggtgatcccacctgtaagtttcttactctttttctctcccaatctctcactctctctctctctcttcagctgggcgagggaagggcgccgaggcgaggctgcggcggcgaggcgaggcggccgccgcagcagaggcagaggaggctgcagcggcgaggtgaggcgaggcgaggtgacggcggcgcaggaggctgtggcagcggaggaggcgagcactggcggaggaggctgcggcggtgaggtgaggcgaggggaggctgcggcggcagaggaggctgcggcggcgaggtgaggcgaggagaggcggcggcggcggaggaggctgcggccttggaggggagacgagcactccggcggctagggcggagtaggctaggtggaggactccgactccaccgcgctcttccgccgcccccttgcctcctccgtcgccgcgctcgcctccttcgagacgcgacggcggcatcacgcgggcacactggcgcggggtgacggcgacagacggcgcgcgagcggggctcgaggcgacggcgacgacggacgacggcgcgcggcgcaggcggggctcgaggggagatggcgacggcgcgcggcgcgagtgatggcgatggcgaccgcccctcctcgagttccttcgcgggatcgacgagccgccgagcaagctcgagctcctgcacgcgggatatacgagccaccgctgcgtcctccccgcgctccgccaccgcccgcacaccgccgccaccacgtcctcccccaccgccgccgacccgtttgagagagagaggaagagtgagagagagaagagagaatgaggagatgacaggtgggtcccacattttttttttataatagagtggtgactggactgccacgcgtacgctacgtagaccaaaaccaccgtagattgggtcgaggagggtaattcatccggtttgcatagttgggggtaaaggatgttcggttttatggtttagaggggtaattcggacgaccataatagttcgaggggtaattcgtcttttttttctttttctatctgctccacattactcctttgcttgtctttaacctctcttaaattgaaacctactccacttgattttgcgaaacaaaaaaggcaagatatttgcctcactagtcctctttctcacctacttcaacttcaaagtcatcagcagctatccatctgcctcttcttcctacacatacacctagttctgcatcttttctaaacggaaaccatttctgcatccttggtacaatcttgagccgaaataatcttcagttctcacagaccacacgagctggattgaggttgggaggcaccgagaatgcacctatcagctaagcacatcatgggagcgcttacttctaatctgtccccataggccatgccaatccaaacacaccaggcataagtccttccttcgcatcaactagtgttccttgagatggggacatgccatgctactaaaccagtagcatcttcctgcttggatcgaccgttgcagtttctggcgatggatgttgttgtgttcgaagcgagacaagctgggggtactgtacgcgttgttgctctttgctagggtgtttgacaacgatggaatgatttctatgccttgcctcgtagctttcggcatgtggtgttgggaactaatttcatactcacgtaaaacggagtagttaattttaaatatgattttctaaaacaactttcgtatagaattttttttagaaaacgtatagtttagtactcaaacatatagattagtacatttgggaagcgtacagaaagaaaacgagcgagcttgagtttggaagatagagcaaagaacagggatccttaacctccgccttcgttctcaagatatggataatgtctagaggtttataacgagtacgtctatgctcaagtaatgttgttgcagttgaactcgtaaaaacaagatcgagttgccgtgtaactagatatgagagaatctcatatgccactgaaaattgtcctaatttcttatatgccattggtctaaatttctacaccctcttatatcactcctatatgttgactgtgtattgaccgttaactcctaagtaaaaaagacatatttgttcttctgagtatatgaagctggaaatgcatagtcacaactctctaggaactctatagtccacaaaatcacatatcggtccatattctgtaacattgatttttttttcataagcagtaagctccgccaccaccatccacaacagcaagagcactagcaagctctggcacaaacgtaattcgatcatcaatggcttggaatcaactcctcttacagagttacgggtagtggcgcgagtccctaactggtggggccacccttacggtcccacatgtcggaggcacatgtccctacgatacgccaaaggtgcctaatcacaatggcatacatgatattatatgaattaaaaacaagagcagtaatacacaaactatagacaaagtcccacatgtcgaagtatgtttgtcatgttctctcaacaacttgaaatcagttttctagggaacactttgttgtaaatatatactccatattttaatagagatgaataaaaatcgatgctcccatttgaggctcaaaaaataatcatcatgtgccaattttcggagcaatttttaccgtccaaattccaaaaaataaattaataataataataaagaacaccttgatgcagagttctcacttctcagccgagagagcagagcaaagcaaccaacggtcaagaactccaaatccccaaaccgcatacacgtggtccatacaccggaacaatccccgccgtccatccctcctacggacggcgagatgctgctctcggtccacggatcacgccgtgcaccggccatttcaaaacgcgataagaatccccccgcccacgcgccgcctctcctggtctccccccctcccgttagttagagcccatagccatagccatagccacctccaagctccaaaccctagggatctattccaccatagttaggtgattctatcgtaggggagttagtagtcgccgcggggcccggatcggaaggaatcggagaagagccgagcaaatcgtaggttgttttcgcgttttttttttttttggttgggtggggtggtgtttgttttcttgggtttctttgggcgattattttcttttcctgatgcgttgtggtgtgattctgatcttttgcagatctgcgggaggggataggattcgcgtgcggggggttgcagcggcaggaatctgaaggtgagatggctgaattttgggagatttggttggtttttttgtggggattcgttggttcgtgttcgtttcccccaaacccttctgtgttttttttctgggtcatttagttgcaaatcgatggggattagaggatttcaggacgaatctgagttgaaaaaaccggagcttagatgttttctggtgtttcttgggggcaatttcttgtcttggtggtttttttttctttttacttggaagaggcaggagccaaatctgagccgcgcagaatttgtgcgaaaaatcttcattccattagttgctcatgagttcttctcgcagatctccaggatgcctgaagtgagaaattccggcggtagggcggcgctcgccgacccctcgggtggtgggttctttatcaggaggacgacgtcgccgccgggagccgtggcggtcaagccgctggctcggcgggccctgccgccgacgagcaacaaggagaacgtgccgccgtcctgggctgtgaccgtgagggctacacccaagaggaggagccccctgcccgagtggtacccgaggagcccactccgcgacatcacgtcagtcgtcaaggtgatgaaccattcccgtaggctgtgtggtgggttggatgtgctctgaatcctgtgaaattggtgtggtcgttttttgtgtgctgatatcatgtgtaggacttcaggtttttattattttgatgcatggtgtgttcttgaggatttgtgtcagttatcatgtttaggtagggtataattggtgaatggtatgttcttgaagatatgatagtgctaagattggtgtgctcgtgattctggaattgtggtggtcttgtgttcgaggttgaattctttacagatagtgaatatcactagcaagagtagcagtctaggaaattaaggtgtccttcgactactactgatgataaatatgcatttctttctgcttatcgcaacaaagtccctgaattttgttagtaagcatttcaatcactaaaatgaggaacacaattgcttgatactataatcaattagtacctttttatacttgcaaaatcatatcagactataaatgaattagcaatgagggacttcaccaaccgatgcttcttcgctcttttttgtatcttcttcgatctgtctatcttattttaggtgatcagtaattagatgacatactatgcaaaatttcagggaagttcagtgaaataacaggcttaaactttgaatgctcttctgatgtgagtaatcaactatgacatgtctaatttgttgtacttgtttggttgtacacacttggggaattcggtctgttataacatgaatcatcataattcatgacaaatttgcattatatgtcgtgtagcccactccatgatatcacatcagtcgtcaaggtgatgaacagttcccatgggctttgtggtggatgttctctgaatcctgtaaaattgtgtggtcattttgtgctaatatcatgttttaatactttaggtttttatgcatggtatgttcttgaggatttgtgtcaatatattgttgtgttcaggttaggttatatttgatgcatgatatgttcacggtgatatggtaatgctaaatgttgtgcacatgattctgaaattgtgattaggcttgagttgaggatgtcttggttacctattgtgaatattactagcaatagttgcagtctagcaaattaagtgtcttctggctactgctggttataattgggcatcttttctgtcactgcaacaaaatcgctgaattttgttagtaagaagcaacgagggactttcttctgaacaaatggtgttttttttgtttttttctttatctgttttgatatgcctatccgtcattttaagtgaccagtaatcagataaaatactgattaattttctgagaagttcagtgaaataacaggcttaaaacatgtaaatgtgccattcatccatttcatgtctgttgcatttcttaatgatcttctgatcatgtgaggaatcaactatgatatgtgtgattcgttggacttgttggttgtacactttatggactaaaactaaagagccaccaatttgggggattgggtctgttttatcatgaatcataattcatggctgctttgcattatagaggtaggtgcattttttagttatatacatttttttcaatggtgtgcaccgaaggtaatagaggatgaggaaatacctcaatgttggaatttgtgctatatagaaccttggcaacagcctaacttgcttgccttgccagtagtcatatcttttgagattcacttaacctgaaaaaattgaactaaatgtattcatcaagctgtagtttaccgggtgcgatttcagtttggctttgctacagtgctttcttctgttcttctcctgttaaattttactcagtgttcgatagtttaacagatactttcctgttaaactttaaggataactttttgaagtactttgattggtacatattcagtacttcggcttgttgtgtatatagctgcttaaatacaaaacagctcctttttggccttgatgaaattcttgctagctgatatattagtccttatcttcatagcaaaaataagtgtattttccgcagtgtcaaacaaccagagttatatatctcattttattataataccagttaatccagatttcacattttgcttcaatgctgtcgttgggggaaagagaaaaggggttttgttgttcattttgttgtacatagttctctgtcatttttatagttattcatgcctttttttccctgtagttgtatttatgctcatatgttgaacatatgcttgtgcagtactgagtcgtagcaggataacaatgctgatacatccttcaagttaatggatataatcacgcatccatgacaatatgcttataattttacctaccatttgcaggcagttgagaggaaaagtcgcctcggaaatgctgcggttcggcagcagatccagttgagtgaagattcttcacgatctgtggatccagcaactccagtacaaaaagaagaaggtgtccctcaaagcacaccaacaccaccaactcaaaaggccctggatgctgctgccccttgtcctggctcaacccaagctgttgcaagcacatcaacagcttacttggccgagggcaagccgaaggcatcatcttcttctccatctgactgctcctttcagacaccatccagaccaaatgatccagctcttgctgatctcatggagaaggaactgtccagctccatagagcagatagagaagatggtaaggaagaacctcaagagagctccgaaggctgctcagccttccaaggtgaccatccagaagcgcaccctgttgtccatgagatgagatgagatgagatgagctgatcacactgtccagaggagagagtgaggcctgctcaggcctgcaactgcgaggttttcccacttgtctgctgctttcttagccgctagtcctagccaaaccctttgcatcagctgctcttcttccatccctgctgtgatcctgggcttgttgaggcatggtgctcagttttgtgtaccattgagggggatctctgcttgaggaccctgggatatgggggggtagcctagctctcttcttgagggcatagataggattagctgttgataataccattcgtcgtactggtacatgcttactgcagcagaccttcaactgtgtatagcttctgtatatttttactgcacgctccattgagacatcgacaactgttagtagctaacaagacaagattttctgtgactctgttattgtattaactacagtatggcacttctgtcgtagaacataacttctctttggtgtgaacattgtgactcgtcgcataacgtcctgatttacttgattatacagtattgagcagtagaaatcatcagaactttgcacgttgttggtgatttcccaatggaaattatactgctttactagaaaatcatagaggcctatctcagttttgcatgcttccaagctggtagcaagattcagtctttaagattgtcttggtgatcaactgtcatttttccctttttttggttgaaaaggtacgacgatctaaataaagatggggattttatttgggagaaaaggcggcattgaaatatttttttccgtaaccccaattttctgtttcaaccaatgatttttcattgaaatatatctcactcgaaacgatttttcttagctatcactcgatttttttttaccgtatgatacacgctgagatgtgtgctaggtctgttatttattgcgtcatggcatggcaagcatgggtatatttagcacagctccaattccaggaatcaacaattccaatggaaaagatgatcaaaatgactcgaacacctcaatatatgattttaattcaggtaggaggaacaccagtctgatttatctaagttgaaacaagcatacactgatcgtatcagttttttccatatgttaaataagcaaacacaaaagatactgaaaatgaacaaacacaaaagaagtggtctaatgtgcacatgggaatcacttcttccttctcagcctcctggatggcaggcttctcgtttctcagcatttccacctgttcagcttcatacaccttcctagcttgcctcctctatcaaggaccccaatgtcctttgcttctcaatcctctgtgttccctagttggagttgggaacatttccaacgatttggcatgattaattaagtattttctatagatttttttttgcaaaaaaacacatcgtttagcaatttaggaagcgtgcgcgcgaaaaaatgagagaaagcagactaaagaacacagccacatgcaaacaccatttctttgtagaattctagattctcgaagaagtgccctgaaggatccgatcttcatatttatgtgcatcagcttttataactcctctgttgaaaacatctgaaacaaacatgctttgacccattgctgatttgcactttcggaaggggaaaagaaaatttggggcacccatattctgaattttgggaggtttcaggatttttatcacgattgttgaacgaaattttcaaacaatatttaaatctgggcaaaaaaaaaagggaaattttgtccagatttagcagcagatcacatcatcctttttgctagacaagagaagggaagagcaaccgaagcagaaaatagtgactggcagttgctgttagctaacactacgatgatttcaagcaactttctcatgctctctaataaaagaggaattattcgcatgggcgaacaaaaacaaggcgaatactttttgaaggcggaggccacctggacactggcggtgctacaagatgcacctgatagtgtagtgacaagtggtctataatttcaaccctaaagtctcatgttcaattgacacactcataatttttctttaaaaaagtatttagaggggtgtctctccctccaaatctcgtttttcccttttcaccagcggtgagccggtgataccatgcgcccggccgcgcaagagacggttgccgccgtgccggtgccggcgccagagacgaccgcatgcagcgtgtgctctccacacgattacactggcgctccatgtcaggcctccacggagaagggcgcacgctgcggcagaaactgatgcagggaaggagccgctcgcttctgatcagagcacggaaacggaagcctgcgcactatactgactgatgcctgctcggctcaacctgtcgaaatctctgtgccatctctgccgcctccggtgagagctgtccagggcctcctggctcggtgagcatgcatcccccacaccgcctcctttgctgaccgccaccccaacggcgccgccggccaggagcccaggacaaccacggtctggatcagcagcggcatcaaccgcacaggatacatgttggcactaggttatgtataatctagtaccagtatgttatattttggaacggatgaagcagttcattatacagtattacatccaggagatacaccgacattgcgagaaactgggaaacacaacttatgtacgatctacagagatagggagttcagggaacgggggaaatcatgtacaggtaagcgaaccttcagagcccctaggagcatgccatgaaagtacatacatggtcggttgcaacacagaaatctgtcgcccatcttggaggcaatgcactggcagaagatcgaatcatgtaacgccaagagatttagttctttttgaccggtcgatcaggttgggagcctctgtggtgggaccaatagattgtgctcccatgcggctgatcattctccgatgcaggacggcccacgagctaatgtagagcactgtgactgcatttggagatattgtcttggaggcaaatcaagattgttccatgacaccgctactccgagtttttgatagactcttgcttttgcgataacacgagcaaagatgaaaactgaagaggataacaagaagttaacttttgccaacagactcagatctgcaactgatgcgtaatgcatatagctttcccaattatacgccgagatggaggtcattctagtaactgaagatggaagggaactaacctgagtaccggcaagtatagtatgacagaagggatgtgctgcacaggaaacaactctctgagatgaaggaataaacttgtttgctgcaggtttcttttcatcggagcctcttatttcctcactgaaacatggaatgccaagtgagaataaagaccaaagaagattgttgacaaaatgtatgattgtgtaaattaagaagaaaaggaaagcaaatatcagctcacttgtagtcgacatggcatgctgaacttgtatctggatgaaaatccagtagatgcatgccaacagtattggaggcagatccaactgcataaatctggataatgtaaagtgtatgttatgcatctagctccaatgtatttcaatgccagatgagatatttattattatgactacagtgataaatgaaagtgccttattcagcattattgaaatccttttcaccttgcaacaagatatgcaggtttcaaatttaataaaaagaattgcatgtgatctataatattcttactgaagatgtcggcaaccaggtcggttttctatgtagcttttgccacatgaagttcatgtgctccctagtaaaacaaacagaagagaacaacaaaacaataggtccaattagcaaaggttactttgactaagaagatttgtgaaggcagaagtaatctacttacaaccaatcaggaggagggcagtgcaggtgactcacactgagggtgttaatgttcaaggctccagacctaacatgcatatggaaaagattgtcactgagatctagaccatagcacagaacacttaaacaagtagaagagtaattaaatatgtcacccgaaaggatggtggatggaaaattccaataagtcaacaaagtaaccttgctttacagtcagataattaataacagtgcaacacactacttaccagccattgtcaagatggaaggctaactgatatgagcaactagggttgaagtctattgaaagaatttcactcgacacaatgttcgtttggtcctgaagacagtgatcaaatatgttaaaagaaaataatatatatagtagcaaggaaacccccattagatgatataccatctatctcacatttaatgaaggtgccaattggaggatgagttataatagcttcaaacaagccgtagaaaccatgccctccatttcattacttgagatgtgtcattttgttgttttccctccatactaattttaatcccaatggcaagaaatgaacttattttaggacaacagaagtatgtccagggtttaggtacttcctgatatggcaaaaactaagcaaactgccagttcgcagcaagaatacataatctgactggtttaaagcactaaataaatccccagtgacctcccttttcagctagatgtgcataatgactgttaggtttgttccaaatatcaagatttcaaaattttcaaaagaaaaaacttgacccaagagaattgacaagttaacatacatatagttttttttttctggtaaacagttttcagaagagtaaacaagctcaagagggatatatcattgccgtttggcgttctatattctactgagttaccgcaagtcaatatcatcaaacttaatagttgcatgcaaaacaatagctagcattaattctaaatttgggtatttaataagtactctatatgaatttgataattcacatctcaccgatactgtgactacatgaaacatctaaatgctcacaagaatggaaacttgcaaaaggagaaattaatttccttatgcgcaatcataagtttgtttttgtttttcatacctttagcgatggaattttgcccaacaaagttgatatcttcactgatgataattgttgaacctagacccaaaagaaaaaatcatgaacagaagtttgctattctgaatatatgatcataaaaattatcaaaatgaagatcaagtaggatggtgcgataccgcataaaaatgaggaagagctagcagagtacctcattatggctttgaaaagcagctgatgccctccctccacggagatcccaggcatgaacggtgccctctttagttgcagcaaacacggtctagaaaataaactgtcagcctccatctatgaatggcccaaactttaacacaaataaccaaacttctttttacatctctaaaattctgtaacactaagttcaatttacaagccaagttggaaactcagaatcttaaacagagataggtcgatatgagaacataattcagaaagctaaagaggcaaagagcttgacactgctaaattagcgtacccggttatctatatttagcttgacactgctaaattgagattctggatgtcctatgagctcaagacagtgttttttacttagccgcatgtcccacatgaagaccgctccatcaaggccagatgcaaataacctaaggaaggagcacaaataagcatagcatattagtaacaacattgtttcatttaaaaaacaagaagagggacgctgttggcaatctctgtagtagcttgcttttacaaaccaacaaccaccataagcagaatccagtcaatccacataccctggctataatcctattttctatattaacataccccatgcccacccaaacaacaaaagaaatatcattgcaatgtgcaaaatttgtagaattcctgggtttacatagtattgtatgtacaataggggttaaaattaacctcaacttctaaattaagaaagaacacaatatgctgtcaatcacagccaagctttacatcaaatactagctagcaatagtttatgcatttacggttgcattatttaaaagaagcaaacataattggcatgccaagggtgaacaatacaaattttgtcacataccatgacttatcatctgaagaaaaagctacatcagtcaaacctttgcggaattcagagagcacaggatatctggatcttcctttccgtaaaatctaaattattaataacagaaggtcggtgagttaaaattggcaaacaaagcaaagcaaaagtatttgatctagagttactagaatacagttcttgtaatgagagaagacaaaacgaactataaatgggaaaagggcacttacttcagttggcgtggacgagacacagccaatatcaaacaggagaaccatgtcagtttgtctagatacacaaactatctgcagcatgaatgcaattataagagataaatgatggagaagaagatttgccactgatgggacatagccaatatcaaacaggtgtccatgttatttggtatacatgtacaaactatcctcagcaggcatacaacaataagaaatagaatgacagataatacaagacacggttcatccttacaaaatgaacccatcaatgttaaatcgacaaagtactttctgatctgaaataagctagaaatctaaaataccacacacataaagattcagctagtgcacaattacagacctcatcttgatttgctggattccatcggacagcacataggggcattgagtttgatatatgtagcaaatagtttgatgattcatctggcaaacctaccaacaaacagtaaattgcagaaggattatgataaatacaaaggcagaaagttatggagaaccttacaaaaaaaagcaacttatcaagaaattataacaacttttgagaaagaacatttggagtgccacctctcactttatcccttctcttagagtatgttgttggaaaatgaaacaatgcattgttcttgcctggttataaactttgtaattgaaactgtttgtctcttttccttttttgtacaaattgtttacccaatttataaaattaactgctgggtgcgcctaactgtagtttcattccaaaaaaatggaaatgatgcattggtcaccattgcaattcttttggtgtgctctcagatgcatatattccaactagatgtgtagaagtttgaatgctgaattgcatcattttgtaccaacaataatgcagtaacaaaaactacagaagtgtacccatattcttggaaaaagaattaagtccttaacttcaatatcacattgacaagaaaaggcaggtctatctcagtgacaaggaaaagcaattttataaacacataatggtttgtgctagaaaggaaatatccacattttaaaactacactcacactcttggtctgcttatgtataacggtttgagtacttgcttatgtataaggggattccgacatgtctgtggacttgatataatccaatttaatctcttagatggtcaagttgggctctgttttaacttaccccgtgatggaccatatgtggagcagtataaggtctcaaaatcatgcacggttaaacatcccgaggctgtaactgatgcaaggtatattccctgccaatcagaaacacaagaaatgtgtgtaaacattttatataggaaaaatagataaatgtcatttcaaacattatagtttagatattccatcacaaatttatgcttagaaacatgccattacaaagttgatgtgttcaccatatgccattggatatccaaattgacctatttgccccatttttcttgctctctcctccctttcagtctctccaccatctcccatgttcccacagtttccacatttcctccactcccatctccagcacacctcttgagcatgggaggtgtgctggagacatgaattggatccctcaaaggtggaggctgccgttcaagatgtggacggcctaacgctacaagacaaattggagttaacatggacgtgctgccaacaagggagccacatggacagatctgctagcaaagtccatggctgccagtgctgcaaggaaggtgccagcactttgcaataggtgcgttgcatgcaaaggaccgtcatccaccctaccccaatggtgctgtcgatcctcctccaatgctgccactctatctcagccacctcctgctagactcagatgacagatctagtagaaccagatggcagaggcagctgcactatcgtagtgcataccgtgggcatggaagccaagtagagaaaggttgggaggaaagcgacgaagatggggtaattaggtaaaatgtgcacaccagtagctcataatggcatgtctcttactagaaactatgcgatggcattggcatgtatgaaaaaggaaacttttaatggcattattctaaattacaacgtattattgcataaatattgtttttccttttacagaacaatatgtaacaatagtcttcaaaaaaaaatatatgttccagcctacaagcaattgcagtaggcagtcatgctaaacaaggaaaattgaactgacatttcaacgctacctttttatcaaattccattgctgaaatcccctctctgccaaaagaaaaaaaaaaggcaaggttattagtgtattaaaaggatggctacaaacagcagagtgaaactctaggaaggagattatagcaactagccaactactttaaagtttaaaattgtgcttttataatgaaatacagcaaataacataaaataaaaatgctgaccttactgcttgaaatcccaggactgaatcgttaacaactcgattcatctgataggagcaatggtagaactcatcagtcaaataacgaacagggattcaacattacaaggtacataatgagccttgtcggtagaaataaggtaggggagaggcacactaaaaaagatttttaaaaaagcacaggatgagcattacatatgttgtacatcgctcctggccttccatgtagtaattgtgactgaaggtccttatcttcccaacataaaaataaataaattaatcaaaatccaataaaatatgttgcaataaaacatgaaaatggttttccttaaaaaaaaagaactggaaaactggcatagtaacaactaaaaccaccctccttgttgtcctgcagaattcaaaactaaaaccctgctatgatggcatacacggttctgccattctcaaagaaagatactgtgctaggatagttaataaagtacatgtcataagctctatttcaagttatacctttatgctactggctgattcatattacatctatagaattgtacacgagttgagatggtctcttaaacaatattttccacatctccagcagcgagcatagagccataagcaccaatttgaaccttggaggacattgacacaaactcttgatctactaaatcaaaaagggccatagctttgttttttcgagaatgcgcaaaatatttgcgcatctttgtattacgattagggaataaagtcaacaacttacaaaccaacccggacagaaaaaagaaacaaagagaaggttacaaaggtgatatgtcccggcataaattttgcgaccctaatgctgattgtcaactccgggagcagacctgccgatctccacaaggcagcctcctctgccgctgccctagctacgtccggccacgagtgctgctgctgatagaacaccctgttgttcctttccttccagatggactaggcagcgagcacgacgacggtatcgaacccgcgcctaagctgttagggacccctttcctgatgcctgaccaccagctcaggaaagaacattgagcaaccggaaagagatcagggcgaccaatgacatcctataagtgctacttcgcaagttctagcacttctaccagcttattgcaacagaagaaacataagggagcagctttgctattggaatctacaacctatgattagcattactaaaaagaaacaaaaaagtaaatatgtcgttagccgctctagagaattccagttccagtgtctaactcatatgcagtaatcccagtagtgaaaacaacttcgtaataaccaacacggaaacaaagcaaatgctcttttccgagatttctgtcacctcggagaacgaatcgcgcaggcgaacggactcccggtgccgaaacctagcgtcgatgcggccgtccagctcggcggcgacgcggctccaccggtgccgtctgcggatcgagataaggtcagagaagcgaaaaaaaaaacgcaatccagttcagtaacgggtgtactgagatcggggaaggggggagcacctcggaggaaccggtgccgccggagcatcgccggaaggtggaggcgccgccacgaggaacttctccatttggtaggggcttagctttgggaaggaatcgtcaaacgaaggcttcgatttcctgcggcgaagaaatggctgtaaatggaaatggagcaaaccaaaaaaaaaacaaaaatcatcgaaacggaggcagcaaaaaaacatccaatccaacctacgcgcgcaagaccaaaaggaagccgtccgccgccggcgctgccggagctcgagccgccggagcccacgccgccggccgccgctgaggccgcgccgcaatgcggaaagcctagggctgtttggagcctagggcttcgtttgaattttggaagggaggaaagcaaaaaacccagcaacacaaaaattgggaaacaaaagaaaaggatttgaaaaatatataatgtatggatggactgtagagcggtatttacaatattatatcaatttcaggtttttatttttaattattaatttagataagcaaaatgcaaagtcctagtttctgcatcaactatggtgcactaatagtatttgccatcaattaaatatacctgaacaaaaacgaaaaggaaaactaatgtagaggtaatcttaaaatagagaatgtagtttagtcacagtgatcgttgttccaaatagcgggatagaaaagagaaacaaagaataaatattctcccgttttaattggaaaaaatgtattgtaaacatgatgttaccgttgttaggtgtttttgcgccaaaataacacataacaaataaaaagagacaaggtattattgttattagcatattttaaaattgacttgtcactctattgagattcaatggtattttatttatgattacatcgacttattgatccgttctcccacgctcctatttcttgagtaaaacatactggaaatgaacaaccaccgcctccgattctccatccttcccatacacaacaagtatcacctcacctaatcataaacagttacaagatacaataagaaccccttttatccatgtgccttatcacctttaactcatttatcacatatatgcacctcactgccactcacatcgtcactaatatatattaaatatgattgtaccatagttttgagttttcgcgccaaaatatgactatgtattattgctattagcatattttttaaatcatttttgtccattctattgagattcaacaatatgtatctatcgttgtatgcactcatcaatccgttctccctaatctcacttccctcatataaaacatacagctatccatcactacttcgccccttccccatgcccttccacatattaacctctctacatgccatgggatcactgagaatttaccgtgccacgtcagcattttttaaaaaaaaccctaagtttttattaataacatattggttctcaccaatattgtccgttcgatctcgcagtagggtcgatctaaccgttcacgttcccgcggtggcgaccctttcttagttcgtcttatataccacctcaatgccactgatatcgtcattactcactctatcccaaaaaagacaaatatagaattgaatgatactcatttccctttcctcatgtaaaacatacaaccaaccatcactacttccaccattccctgtctccgttttatataccacctcaataccacttatatcttcattactctctatcccgaaaaagacaaatatacgattataaatgttacgatttgttgtattatgttacaatcatattcagttataagttgttttttttttacgggaggagacggagcaatcactcttattagatcataccttcactatcgtttgcatacttgaatctataaacctcgtactcctaccgacacccacactccatagggatgtccaaaatctggccgagcacgctgatatgttactaatccgctattaccttgttttgttgcgaaatcggccatctgctattactgtttgcaaccacagcaatcgcccttcttttatcagatcatcttgtctatacactaatgctgcaaatcaaactcatacatgcttttttgtttaaatcaatatatccgtaaacaagttgaaacaaattgtaaacaaccgaaacgttaagggcaactcgtcagcattgcaccggcctaagtggcatgcatcaagcactgaaagttaaataagttaacctcgcggaaacaagcaaaaaaaaaatcaaatagacaccagtacacaacttgcaacgcaatagcttaattatggctcaaatgttatgcattgcacatttgagtaggtacggtaaccatgaaccaccaaagtagataatccttctcttaatcttctcataatatttgacaggcagacttcaacagaaatggagagttcactacccgggtacaaaattcagaagtacagaaacacactaggcaaaaagacttcctcagaacttgaaacttgtaccgactaacttagaatgtcatctcatggggcttgtcgccgtccctgagagagaaccgggcaccaagataggatttcaggtctgggacaacctcgatagccttgatcaactcagcatccacagccttctggtcatccttcttgaagtcgggcagattcttggttgcctataagattcaacagagaataggcaggtgagttagcattggagctaaaccggtaactggccatggaggaatgccatacagaatcaagacatacctccttctctgtctcaaaaagttcaccctcggtcttcttggcctttgccttcttgtcccgggcaaagtacttgtcatcaaacttatccaccttaacaccagagatgtcaaccttcgtggatgtggcaatgacgtaggcctggttcacacggcggatgggcactccattgatcttaaaaggtcctgaaggagaacaataagaatttaggccaaaatccagtgctttgattgtaaaaatctgaacccaaccaattcattgattgtaatcagagcttaaccaatttcctggcttaggtcagatcccatcaaaatgaaattaacttgattaaaacaaagtgagactattacattctactaaaaacatcaaaatatgccagagggtgagtggcaaaaatatacaattccctttttgcattcagtgtgcatgttatatggaatttccattacaaaaaacagcacaatccattttacatctttgtattacagatgcaaatttcagctcaatctatatcaatgaggcaaaagattcctaacaaaacaatatttgccaaaataactatgatggattgattgtccctgcttgtttgaaagaccagctcttatgagcaattcagagtaggcactaaaattgcggtttagagaacatagtaacatcaaaagtttagtagttttagccctacattttttttgagttatttggttttatttcttaataatacagttgttactactaacaattaacatgactcaatcgcatggatatgaataatacagtatctattagggaaatgaacactcgattataaattgggtaataaatctcacatttgcatcagatataaatcgacataagctacaggtactgatttcacaattcccgaactaaataacaaacgaagtgcaactatacaaaatcaattcatagatccgcacactacaagcttcccagatggcacagccacaagccaaaatcaatcatcgcagtatcacaggcacggggagaggcgggaaggggtttaccggtgatgaggagcaggccggacttgagctgcttgaggaacacgacgcgcttccccatgtacctcccggcgagcaggatcagcaccgtccccggcgtgatggtcgacctgcatcacgcaaacaaacaaacaaacagataaaaatcactcaggaacaccgatccatagatcacgagcagccgatagttggtcgcatggctgagacctgagcttggtagggttggccttgcgggtgctgggggcgcggggcttgacgtcgtcggcggggtagaacttgggctcggcggcggcggcgggcttgccggccttggggaaggtgccgccgttcttggccttgatggcccagagcccgcggcggtggtaggtgtgcgaccgcgacgcgcgcttgatgccctgcgacagcttcgacgtcggcgccattgctgcgggaggcgcttcgctgcggcgcgagagagagggtggaggcggcggtggggtgggaaggagaatggaggggagggtttggtcgcaggtttatatacgtgcggcggcgtggaggcggaaaccctagcttcttgggctctcctggattttggtcttgggctcgtttaacgcagcacgtatgcacgcggtatgtttcggccgtggaaaaaaagtccacttaacatccctcaaaaagtattgattgcttgacccttaaccgcaaaactgggtatgcctccaacttgtaaaactaagtacaaaatggacgtaatctatatttggtttacggttgagggatgcaaaaccagatatagagtatactccaactcgtaaaactaatgtaaaataaacgtttttattatatgattgagggatgcaaatgaaactcagacatatatcagggacgcacatgaaactaatccgtccgttttgttttgctaagttcacagcccataataagagcgaagcgtttgctctagacagatttttacgggtagatgttttccccctcgttattttgacaaaaagtaatttcaaatcttttttgattacctcacggctatccttggtacttactttcggttgcatgatcttgtctgatagggcataaaacgacatataagcaacagaagaaaaaagatttgttggtaaactttatgtttgtgttattgcagtttaaaaaccaacataaaaaataaacctataatcaacttcaaaattaagttttaaaatttaaactttagaactgacttatgagcagagcgccaaacgatggaaagtgactcttttttccccttcctataagcttgctcacatcgggtcctcgtttttggccctgtttagtggagcttgtcccagctgtagctttttccaaaagctgccccaaacaatccatagcttctgagaatctatagttacaaattctgaaaaatgaactaagaagccagaagctgacagctgcttctcagaattttaagctcccccaaacaggcccttcaaattgtattgtgccaaaaacatggtaaaacagtggtaacaaaaaaacgtaacaagcaataagcacatataagtctactaatgcgaattatacttttaagcacgagacgagatggagttaggataggacactaaaatcttattcatgtaaataatagactcatggtgtcatacaagaaattccacgagatatagtaaacaaaactcgtgtcgggtgacagcgagagcaactagtttaacgggggttgatggttcaatcactatagctgaactagtcctcccctttccaaagttcagcaaattcatcaggctccagagtgttctccatctcgtgcatcttcctcctcaccttagccttgaccttcttggcatacttgccggccttcttccgcttctctagtgcacggatctgacgaagataacaaaataaacatatgaactacacgtgcagtcgtgcaacatgagggtaaatgatttgttatagttgaatcaaaatcacaatgcttagacgaatcaatgaacagagcaaacacaacagcaaaaacttttgttggtccatttaatgatacacaaaagaaagcgtaagcatgaccagaacaaacaaacctagattgctttaacattttcaggtgctcacctaagatgctcagaaatatgtattgtacatacacagcaatcaattggtggtaaaaaagggatacctgattgggagacacatagaatggattctcgtacaatgtagggccaccgaaactaccgccaaatattttgattgggttcaaacagaaccttgggccaacctacacagcaagttcgatctcaaaactgaaactaaacttggaaacataaaaaaatattatacaaatagaagctatgcgcctttacctcaacaagtgtcatcttgtccagacctcctttatcaaccttgtcaatctcattgtggggaacagaaatctgacaaagttgatcatacggtaatattcagacaatgctaggaacttctattgcttgtaactggcaggagttaatgaaaattaagaaaacaaacagactaatatattacctgataatttctaaaccaaacatggtcatcaacgatagagaagacaaacacatggtcatgaaaaggctttgcctttcgatgatcttttggagtagcaaatatctgcagagcaaataatagttagtttcttatgttttttagggcaagtttgtttctcaactgctttactagaaaagaagcatgtataacttcatcacggattgcattcccccagttctccataaagttcataacatgtgaaagctaaaacaacattcatattggcatcatgaccaaatattaattctgaaaactgacagcattaagaaaaaggtgtatgatggaaagtactaaaaaattgtgaagtctagaaccagatttttaaaaggattacactttcttaatcaaagttatcaacatgtcaaaaatggatgtaaagtgtttcatgtagacagtacagcagatacctacaggctagtccataaacaacagaacactctcaatacttgtgaattgaattcacaaactgggttctacaagtacaataagacattatcaaaaaacatgtatttaattcaactactcaagtttgaacgctgttaccaggcaaaaaaccaagactaaagtcacaataagttgataaagattagttatttagtctagtgcatgatcaacttgttcattgataagaatgcatgtagagcaaaataacatatcaaatcagtcatgcacctgggttagcatttctttcacaagctgccagtgaggttgttcatcaaaatttgtagaaaatgttataagaggccgtgaccctttcagatggttccctgtaagcttcaactcctccatggtgtgaactgcatgtaaacattactggacatttaggcactgatggaataatgtccataatcttgtacagattacagctcacaaatacttgacatacttaccagcattaactagaaatttcactgatggtcctccaggggacttaaccatccaaaggtaaagatccttctgttttctgcactgtagtatacatatagaagaagttccaccatcagaattgcaatactaaggtctaaactgaacagagaatttgaagctccaagctttattatcatagtgaagtagtagctcagtaatctccgcagcagaaaagaaatatagaattactaaagagtgaaattgttttagcgctagaactacaaatcactagcttaatgcatgttaagaacagaagtatagaacgattcaacagctagtgataatcctattgcatgcttctcctatcaagcacgcaaccatcagcgcatcaaagatgaggcctgaagcaacttgagatcgtagcagtatatgtgtaaatatatacctcgaagaagaggcagctggagcagttcctgagctcgagcagctcgttgagcgcattgcccttgctctgcttcgactcgaccttgctgtccttcttggcgtgcggcagcagcgacaccacgttctgcatcagatgccgatacctacgagcaaaacccaccaccccaatccccccacaaaaacaacacatccacacatcaatcgatctatccgccgccacatcacaccgaacgaaaaaaaaacgagcgcgcggtgcggcgccactcaccggtagttgattcggcgggagcaggtcacgagcaccttctccttgttgcggaacggcgccgcggcggcggcggcggcggcatcctcttctccctcagaggcggcctcggcctcggcttcctcgtcgtccgcgggcttctccttgaagccgaagagggtgcgctccgggcgctgcggcgcgaactcgtcgggcttctccaccgcggccgccgcatcggaggagcgcttccgcttcttcgccatggctggggctcgaatcgcggcggcggcggtcgcagctgcttcggcggcggcggcgcgaggaagagaatgggggtgtatatgcttcgcggaggaggcgagcggagggtttaaggtcagagacctgaattaagtgggcctagcccatgttcgcatctagttatgggccgacgcagtgcggcccacattttacggctgggctccaaccctctcaggtcaatgggccaccacggcccatatatggtcgacacagcgcaacgaacgagagggggaatgtggtgaataatcccacctcgctggccggaggagatgcggggtgcggctggtgctatataaggtgggtgaggtgcaacgaaaaaacttgccttaaactaatgagtaaggaaaacaaagcgttgcggtgagagccgctcgcggtgcgggactcaaaccctgcacggcaatttttgcgaggggaagaggctcgcgcgggtattgacactgcttacttttgcaggacttgcctgtgtgggcctccctacccacaaaataccaaatctaaatttagctatagttaattaaatagaactctttttaaaaaaattcaaatttgatttgtaataaattatagtaatatttataataaaaacaaatattgtattaaaatatgtttaatataaaataaaattaaattgtagtacttcgatttaatgtgagttattttagcattttttatattcgtattacatttgtattgatgttaatgaatttaaagagtattgatgttaatgaatttaaagagatttatatgtttatattcattaatattagagaaaatgctagaatgacgtactctcttcatctatttcttatagtcatatttcatctacagatcaagaataattaattctacatatttgcatttctcgatgcccataaagccaatctacatatttgcatttctcgatgcccataaagccaatcttgtgtgtaagaatagagtagatgttagctattttttctataaatttgattgaatgaatgtaagctagtttttctataaatttgattgaatgaatgtaaagaattttgactaagaaataatatgacactgagtaaaacggagagagtactttctctccgaattggtttattttgctgtagttaatactttttctttaaaaattgttagcttgatattttttacctccttaaaaatcatctcttaggtaaccttaaactataaatattcttttcccaacccttaatctaacattgaataaaatagctattacaattgtttgaaaactattttttattttgagcatttcttaagctatacttatgctttcttatttataaatggttaaatctagttgaagatcttcactgctcactgcgggtgtaagggcatgttaggttgatatttaaatctgttaagcccatgttgttttgctgtcacctcttgagccggagaagtcacatgatcgattgatcagtgattggtccatccgtccaaagtgcttgaattacacgtacaaatgtacgatacatgcaccgctgtagtaacaccgaatttgtctgtgacagatatagccccaacgtttcgatctgtcaccagagggggcgtttagatttatgggtgtaaagttttggtacgtcacatcatatatacagacacatatttaaagtattaaatataaattaataacaaataaaattacaaattatgtttgtaaactgcgaaacgaatttattaagcctgattaattcgttattaggaaatgtttacagtagcaccatattgtcaaataataatagagcaattaggtttaaaagattcgtctcacaatttatccacggatgtaattagttatttttttatatttaatatttgatctgacagagcgaaaaattttgtcggatctggacaagcacaaaggcaaactgcactgcagcatcgcaccgacgcgttgcctttttcacgaagcttcgcacctctgtgtttgtctgtggctctgtttcattctcgatttgcgatggggcaccctgtggtacccgataacaacatgctaccaaacccgaaaaccgtgcaccaccatgatttggttgaggtttcgaacgtgaaagtaccggtcaaccgcaagtagtggcaaagaaacaagtgctcccaagattttaaaagggattgccaggatttcgaatataagaaattgagaatgttgcacttgtgttcaagcctttcaaacttaaaatcaagtttagaaggttgttaacgagagttcgatcatcgtcaattttcaacgcaagtttaatcgtttaacctacaaccaagtttctcatatgatctatgggagattaccgttaccccacaataagacggttatcacggtaaccgtttggttaccgctaaagaccatgtgaattttatcttctaaaatttaaatatcaaaatttaaatcttatgacaatatcgcgattactgtggttatgtcgtggcaatcgcagcacgataaggcgtggtaaacatgctcttttgacttaaataaaaagaaaatcacgggaaaaaaccacgtttgacaatagaaatatataatgtctacaactatgatgattatagcattcacatataacattcacgagcatcaaacatcgattttggaccaatgttgccttttagtcatgccaaaatatagaattagctttatttttataaagttttgtcaccagatatcattgcaaatcatgtattgatcctataaattttaggagaatttatccttttttcataatttggatccgaacaaaatttaccaaaccctacttccaataactcttaacataccctcacaaataaggacggtttagcaaaccttgtctacagctagtaagccataaaatggattattaatagaaaaaaataatgaatatacttatatatatccatgttcttaacgacttgaaagccagaataaaactacgattaaaaaaacttacaaatcaactctaaaatttagtttcacaattcaatttttgtatgcaattgataagtcaaaaggcaaatgatggtcctgcagaactgatcggtgtgttgagctctttggttgcatgtattattttgccaaatattttgagctaagatacggcacgccacaacttttgtggctaaggaactattagctatgcaaactttggctatgaatagtacacaagcgaggaccctaagttgaatgttatgacacatgaaaagtgtaaacaaaccaaacgttgggctaagttgattaaacctgcgtgctaatgttatggcaaactaaggctatgaatcaaacaacaactagtcttcaaaatggcatatagatgatgtatggttattcattgtagaggcgatgctacactaatggatcttccgcttcggtttgatgtgatccaaacataactggtataatgaatggccgctaattttagagattcttctttctagttttagaaataaaatgactatatgcaacttataagccactagacaacacaatggttttatagattcttgcatccatattcgaaaatgcaagtgttatctctgccttcaggcttgtgttatactaattgattttcttgttttgaattaaaattacgattttgtgacttgcaatccttctgaaatttcttcatctaaaataaaaaaaagagaatgcaccatgcattttggaactactaagagaaagtataataggaggttgtaagccaactaaataccgaggtagagcagagaaagaggagagaagacaaattaaccatgtactaccttcgtttcacaatgtaagtcattctaacattttccatattcatattgatgttaatgaatctagacatatatatctgtctagattcattaattgtaacttacattgtgaaacggatgaaatattaattataaagagctaactattatatgggtgggctgagagaagactataaagaatcttacatacaacaagtcagctgtattattaactttgctctaataacctgtcaagttgggatgatgctgatttggaattttacaacacctttctttgattgctgaggctgccaataagaaggcgacgcgagcaaaaaaaaaaaaacgaaaacaaaaaggcgcaaaaaagaaggaaaatattttagcccacacccccttgcgtggcccccacacccggccacaccccctgcaaggctgcaactgcaaagctccccacgccacggttccaccacctccacctccaccactccatccatcaccacgtctcgcccctcgtccattcctttttccctccctccctcgcctgcctccacctccacctccacgggcgtcgcatcacaacgcaggcgcacccccagcaacctcctcctccaccaccgcagatcgcgctgcgaatccgcccgcgggcggcggcggcggcgaggacgcgagccccagaggagtacggaggagccttcgatctaataggtgcgcgccgcgtaagccttcgcctggcctggccaagctcttccgcgcgattcgcgtttcgctggggaacgcgacgccgcggcccgcccgcgtgggtaggttcggtttcaccgggcggggcgctcggatctgcatttggcatggggagggatggttggattggattggattggatcgtgcgtgggaatgggatcgcagcgatctgcgcgcgcgggggtgtgtggcacgggagcgtatttagttggttgttttgtttggtggttattttagatgcttggttgaaatctggctgaaaggcaccacgaattccctttacttctggtgtttatcgaggatgcacagcggtttcgacgagatgatcttatatgaggctgatcgtactggagatgtgttcatagcatccgctctgcttaggattaaccagtttagaatacacggtcttatggattctgtgatttctgcggagttagtgcctcacagcaacgccattgcttatatcagatatcttagtggagaactgtgccagcaatcgggtttacctgtgggtgactagtcacacccattttggttcacttggatacttggattacccttaaataattaattagttacagagaatatgggttctcctctttttaacaaagaatttacgttttgtttgctggtcctagcttaatactatgttatccaattcagacaggccgaaagtaaaatttcagctcattgcatgacatggcttattacttcttattttcttacctttgtcaaatgtggttatccttaactgctgggtgtgccatgtgcagttgctatgttaaatcttcagattagtaaaaatcctaaacggtaattgtattagggcctaggtgatggagcttgataaccttgtttgagcagctagtatttcttttaatcttgtagtacacagatatagtgctatacttttacaattacagttttacttactgcatattggagcttcactctttctttttatctacacagaaatatttgtaagagcgcactgacaaaaattaaacagtggattttcatttatattcgtaggggcacgcggaaaaaaaaataatgtggaggttcaatcccttcggggggaaagtacaaaatggattggaaggtcgcaccattgatgttggcaacattaagattacagtacgcaatgctattgcacaaggaggtttctcttgtgtatatctggcatccgacgcaatgcatccatcaaagcagtacgcaatgaagcacatcatctgcaacgactcagaattgcttgatcttgtaatggaggagatccaggtgatgaacctcctcaaagggcatcctaatgtggttacactagttgcccatgatgtttttgatatgggccgcacaaaggaggcactacttgttatggagttctgtgagaagtccttggttagcgcaatggagagcagaggtactggttattatgaggagaagaaggcacttttgattctcagagatgtatgcaatgcagtttttgctatgcatggtcagtcaccaccaattgcacataggtatgttgaaaaaaaaaattaaagtatcaaagatagttatatctcatcgttgctagaacgttttatgtgcttttatcaagtatttgaaagtacgttcctgcagtagttatgctgttctgttttactgtttgattagattacttgaattcactaagcaattgctggtatattagcaaactgtgtatgtactaaatttatgttctgttgtgaagtgcggaactcctgcaccttgtagcttgtctattttctcaaggctgggcatatgcaaacaaataatcagttagggttattccagattaggtgtaaatgagggacctggttttatagcaatcgctttattgtttatcacctacatgcatcttacattctgcctcttttctgattctttagggatctgaaagctgaaaatgttcttcttggattagacggtgcatggaaattgtgcgattttggaagcacatcaacaaaccataaatgctttgataggccagaagagatggggattgaggaagatatcatccggaagcatacaaccccagcatatagggcccctgaggtaaagaaacaattgcccatggagtaatttatagtttttaaaacctgtgtaacccccagtgaccccatggatgcattttccagatgtgggatctttacagaagagaagttattagtgagaaagtcgatatctgggtaagtgtaattatattcacagcaagtactattatatgctatatccactttaattattatgctggcatatctacttagcatttagatacatcttggtgaatcacactgttcttaatttttgaaatctatatattcatcctgcaatgcattatattcaaaccaaggtgaatttgtttataaaatttttttgaattgacatttggcaggccttggggtgccttctatatagaatatgctacttcaagtctgcatttgatggagagtccaagttgcagatacttaatggcaattatcgtattccagagcaacccaagtatagtgccgctgtcacaaagttgatcaaagatatgctggaagcctctccaaatgacagacctgatgtcacgcaggcaagagctttgattgattggccattcatctccatgatactaggttagtcatagactgttgcatgtagccttaggaaccacataagcatatttttctaaatctgatgttagactttgtacatttgacaggtctggtttcgtgtaaatgaactactacctctcgagttacagaaaaatctacccgatggagcttcgtcaggcatttccatgagtttgcaagatgaaggtatgctgaaagacatgctattggcactagaatgcacttcattattcatgtggggttgcttcaaatgtatgtgggccatcttcaaataaacatattttttggtatttcttatgcactcgtatatctttttctcatcagggagcttttggcatcctctatgatttgtttggatgttatgattatgggcattgcttcactgcatttgtcattgacctattttcttgtcctataggctaagcaacctttctgtcatgacctaccttcttgtcctctaggatatacagcctttgtgccatgccatcatgatgtgcactgcatgctagaataaacatttactgttctagtctgattgttagttctaaatattttctaaaagatagtgtgattgttggctgaggtaggcttactgcattattttgctattgtcaattcagacagaagccaccaaatcatgtaagattgcaataatttgtttgcataattggagccttgtcttgtttttttcttgtataggtgcttataaaagaacacatgtgatgcctagaaggaacccgcctcctcctccaatagaacaatccaatagttcgttatctcatggaagctcaaaggcaggagatgcacctctaggtgcattttgggcaacacagcatgcacagggttctcaagttgcagataataggaactctttgtttgatgaggaaccaataaaaccatcaccttcatcaaagcataaccaaagcagaggggatatcagcatcagtgcccctggagatagacatggtcgttctggccaggctgtccggggtacaccaagtaactctgtatcaaacaatgggcttgcaagtggtgctaacacaaatctgttcatggagtcacaaagttctttgaaaactaaagaatcacaaccaaaatcagagaaggatcccttcaacagctttgtcgctgattttgaagcaaacaatctccattctgggaccaatgttgctagtaaggaatctgagcttgaagcagaagtgtccaatctgaaggagcagttgaagaaaacatcatcagagaaggccgagatgacagccaagtttgaaaagttgtctgcaatatgccgctcccagcgccaggagattcaagagctcaagcgcactcttgccgagactacacctccatcaagcaaagtcagctcaagattaccagactccgggccacaggttcgtgctccgtttgtatatctggtacaacgtatttaacctatttcttaattctgttagaatcttacctgagacttgcattcatatgtagcgtaaggagaagattgaaggaacggtgtgggagcttgagcaaggaatgctcgcaaactcattacctagctctgaagccaaaacatggcaggcattccctgaccccaaatctcaacctgctcaggtcagaccaaaggttgatcattctaccaatggagcgcaaaacctggcaaggaacgcaaactcaagacaatcaccagatggttggggtttcgggccagatagtttcaggacatcaccagggagtactgccgctcagatcaacaggcccactgctcaggggagttcctcccagagattcagctcaggagcagcgaagaaagtggagcaaccatcagggtgggccggattctaacttctcgtggccattcggcaattgtccattctcattccgaactactagctgccctatgctgcaattgcgagttgaagattgatgagtgtggctatggttcttgccctggcgtagggtgccatgattggttattttcaacattgttcatagttggtcaagccgacctagacattggtgttctgcggccgttttgccaataccttgtcaataaacacatcttcaaatctaattacaacgtctgtatgtactttacgtgtgaagcatgaacacgtgatggcaatgagccctggcacaacgcacaacagccatgccatttacatgctacctcggtactccatattcaatccttatccgcagggtaatgccgtgctaatctcaccgtctttgtaagatgtatacaaatggattgctcaatgttttgcctgttgtaatcacaacgcatattgaaccgcaagctaacaggcagcgtgacggagctactgggtgactgctacctcggagacaggctagagatttctacttcaattaatcaacttacgcgcccatcgataataatttatgtgttcttagtaataaaagtaaaggctgaaaaataaactttgataaaaaaaccctcaaaattagcttcaaatttaatgtgaaatatttaaattttgacttataagtataaatataaacgaaaagatgagggtatttgtagtatttagcccgggagagcgcacaatttttagtacgatcagttttccgcccatcattacgcctactcaagtgcttaccttgtgcaactccagtaccatgagaaaccacaccaattaacttaatcagagttatgagaagaatgcatcaaatgatcaaatggaacatgattgtcagtcacacaagactttcactggtcagggaagcaaaagactgtttggctgtttgcataagcttctcggtgaagttgacgatggtgaggtgaggccgtgaggctaacgagaagcttcgctgttccaacaccagggggattcagcggattcgtggacacccagaggcgggctccgtgccggcctgcccagctgcagatctcggatgtttccctgagacaaaaacagagaaggaagaggcccatgtaagatgggctttcaagtcagctcaagcacccacttctcactaccgatgtcctctacaagcactattccctcgattagtaccataccgcttgccgaacgacgccaagaccagcttaaatacgcgcttcccaccatctccaccagccgggctcggtcgcgcgtgcctgttactccagctttcggagggctaaagagttggttgttggggtttgtgggctcgagcccatggcaaatcgccggggtcgaggtcgccgaaacgaaactctccctccctaaatcggacgcgcgccggcgtgccctggaaggggggaagtcgccaggccgccgccgtcagatagttgcatgggaagaaaaggcgtgggggcgctcgcgctcttgttggaccgaggtcacctgctgtgttgcaggccggtcgttgaaaaagaggcccataagagaaaatgggtactcactcactgatggggtcgcgggccaagagagaaggccccccgcgagagaaatttaccagccagctggagttgggtcggtgttaggtcggtgcgtcgagccggtagaggagattggggctttcggagtaggggacttggcgtatttggtccaggctggtcggcctgtataggctggcgggttaattgggttggggctctctacctcaagcccaggcccgatagttgtgcagctttggatttccacggagccggggttcccccccgggactcatggcaaaggacagagtctctgtccgatgcacgagatgagcctacgcttcgccaccctgctgcaaagccttcttcgtggtgcatgggttcgcccacttaaacccccactaccaactctttttgttatttctctaaaccacaccttgcctcttttgttattttgtttctctataggtgccagctggacaaatctaacccaacgacagttgaattgggtgctgttgcactggagtatggcccaagatgccaactcttttcttcatttgttcttctgaacctctatatattgtttttgataccagctacttcctctgtttctatatattgtctttccgtttttggcaatgctaaaatgattaaaacgaagcaagtagttcctaattaaacatacccacatccacaagtttcgtgatgattatgaattgtgctaacaggcatgcggttcgcagtgcttcagttaagcactatgcctcaccatgaaacgacattcggaggaacagagcaagcatgcatgttgctaagcattcgtgtgtgtactaagccgcatgcagcttgcagtgcttcatcacttcgatgcatgcgcgtatcacagtttgtcgttcgtatgtgacgacacagcatatactccggagtagtatattagaccaataatgcatcaaatgtaaaattccggatccctgtcaacttagaaattgtcaggcgttaagagctaagacagcatatgcaaaatttgaaaattcaaataatccattcgattaaaaagatgaaaagcaaattgatctccactgtagtagcagccacaccgtaccacaccacgacacatcaatcacaatgtgtgggggcagtgggagacatctcagttcggaatagaagacgactcgatcgcaagtactctctccgttcaaaaaaaaaaaaagataaacactagtttccgtgtccaacgttttaacgtccatcttatttagaaaaattatgaaaaaaattaaaaagataagtcacgtataaagtattaatcatgttttatcatctaacaacaatgaaaatactaattataaaaaaaattatataagacggacagtcaaacgttggcacggaaatccaggatttgtcttttttttttggacggagggagtaggcaagctgctgattatcatcgatccgcccaccgtcatctcggagtgcgccactgccagagtttagtccccacatcggtttccggcgcggaatgcgcgcccgataaagccgcggccatcccccggtagcgcaggcttgtccaacgacggttgaattggagggcaggagagttggcgagtgacagtgtttaggcatggtgcgcgcccaccgtgatggtacacaccgtgatgtctgttcaggtcgtcggcgattaagttcgtttgcgctcttgtcctcgacgtataccacggtctccggtcgagcctatggtcggctaggtcttttcatatagaggaggtcccaatgtaacctaccctcctcgccaactctcttttttttcttacttctagttactaagcaaaattttccatgatcaaccgtttaactggattctgtttgctcagatgagttacttcgctcactactactcatcaattgagtaagtcagaggctcaaatggacaaaaacagagccaaattatgattaactttaagtattgttcatgtattattaatcaacaaattaacttttgtaatgcaagtatattttaatattttaattgatgcagtgcatcaaacaaagtaaacacccgctcccgtttgaacatatactgtaagtaaacctctcaattgtagtactcccgtatgtgactgcatgatggtacacaccgtggtaaaggtgattattactgcatcatgcggctaatcgcgcgagggcttcgccggcgtgctccccggtggactgcctgagccgccggtagtcgtcgtagccgaaatccctgaaccggcgcggccgctcggcgctcacgaacgcctccggcgcgcgcaccacgtcgtccttgggcgccagcaggaagagcgcgatggagacgcgctgcacccccgccacgcaccgaacgcggtgcctcacgttgtgcagctccccgttgctccacgcctgcacccgcgcgccaaactcacaacacgtacgcgaaaccagacaaagatcatatactccctccgtcacagaatatatcaatctaggatgagatgagacccatcctaaaacaacgtatttagacattagtcatgtccagatacgttgctatattctgggatggaggtagtactatacaagtagagttcggcacagcggcatcggaatttgtcatacataccgtggcgacgtcgccgaggttgacgaggaacgtgccggggagggggtcgacgggcgcgaactcgccggtgtccgggtcggcgacctcgaggccgccaacgcggtcgtcctcctggagcacggtgaggaagccggagtccgtgtggacctgcacgccggtcttccccacggtgtccggcgtgtagttgtacctgttgatacggaattggcacggccagtcgccgaacgagcagtccaggccgaggctcgtggccagcttcgccgcgacgtccacgaccagctcgtgcgccttctcggcgtagctcctgatggcctccctgcaacagatcgaacgatcgatcagagtgatggaccagcgagcgcgcactacactactgtcgaaacatgaattcggcaataataaaagggggtagcgtacgagacctaaagtggatggatgcagagacaaaggatttagacaggttcaggccctctcaatgagaggtaataccctactcctgtttggggatttgaatccgccgagtgtgtattgatctgacgatcaggttgtctcatgcccctagaggggctccctgccctccttatataggttggggggcagggttacaagatagaaaccataaccaatacggtatcggtttcctaaatctactttacaatcttatcaaaccaggactttaggccgttccataatatacagggaaacgtaatacccaagtcatgatctgttacatatttcatatatataagttatcccctataactagtcggataaccatgccgtgtgggtatggggtacccataatctccacagtagcccctgagaccttcacagtcggaaagataatcttctctcgaactagattactccaaagccgagtgcttcaatcatcttcgccatgatctcccgagtactttttccaagtcagaagactgtggagggctggaaaataaagtcaggtgcaccgactagatgcacctaataggtgtagcccccgacaatgtggttaattgaacaaaccaagcatatagtcaaggaataaataatccaaccaaccgagtggttttgataatcgtaatcaaccaagtgacttgatatcaatatatagcatatgcggtgtgaatcctccaaataacatgatccgggtgatataccaactgctttgtaaaatatgatgaatgatatagcaaaatagctataaagaagcttgaatgctgtgaataaagaaatttccaaagtattgggcatacgccatgcgcacactgctttaacagatgtgcttaagtccctaaaagacacatggtttcaccacacctggaaatatatggcatatgtggtataacatccgagtaagtaaactcataaaggatttaccaaccgcctgaaaaatgaccataatatataatcagcctaagccataatattggtcaataaaaatgcacacttacgtggcgaaaagcaatgatattgtatctaatcaattgcttaaaaatccaaacagcaccttgacttatatataaaaaagtcagcgggccagctatataaagctttactgtttgacaccttttaagatgcattgtaccaactcctaaaaagttgagtaactgcggtataaaaggattttaaggtattgggcacttgatcacgcgcactttggcctaagcaaaaagtgcctaagtccctaaaagaacgtgacaggccacacctgaaaatatgggctgcagacatattaggcctaggccaaaaaatatgccttcgacaccctttaaaggatgacgcatgtaacatactcccgagtaataaatcttccgggtaatatagaccaagtgtagctcatatgaatagcttctgatatgaatgattatcccttatgggatactccaaaataaatataataattgaatcccgactggcgcaagtattcggttgatagcccttacggggaataataattggtccagtctttgagcatagaaaatagactcatgactatgaatccatgtggaatgtatccggaacaagtccaaattggagatataatcctcacgcttgagttgatgagcccctgagcatatagcttgtccttctgtcatagtcaaaattgtctattggcaatagctgacgcagtcggcatggagatgaaatgaccaacatgaagacgaaattgctcatcagaagtaacggaagatgtcagtggtagtaaagatgccaccaatcaaatgtaatgaagttgcataaccatggaggcgaagaaaccagttggcaacagtcaggtcagctagcagtgaagatgtaggcgcccaacaacaacgaaagaacagtcggtggtgacaaaagcaaaccgacgatgaagatgtagacgcgcatcaacggtgatggcgaaatccaccaatcatgaagatgaagaaaataatcggcggcgacaaacgcatccgacggtaatgatgattagcggcaacagagatagccgactatgatgacgaagtttcccatcaacggcagcagagtaggctatgttgatgaggcttgacaagatgttgatgaagatgacgatgtcggtgatccagtcaatagcgatgtagcagccgatgataacgatgagatcctctatcggcagttgcgtagtaggccaaccgtgaagacaaataattggaggagagttgatgttgttgcccaactcgtctaaaccgaaatatttgaagttgttgaagtagaatgtctgttccgaagcaaagatgaagataatgactcctggagttgactcattggctgattaattgatttcttcagcttgacataaaatttgtcaaattttgagccttatatttgtgtagcccccgactctttggttagttgggaaacaactgaacatagagtcgagaattatagcttcttgtcgtcgagtagtcattgcttgattgaagatatgtgctgaaggtgtccaagtagaaatcctgaatattggagagtcactggttgtagtaaaatatcatggcattgcatgccgagatgtcgaggttcacaaagacgtcgtggttggtgaagtagtaaaacttgcgaagtagcagcaatagagtttgccagtgccgaagataataaagatgaagtcgctccaccatgatgacaaagttgcatcgccgtgatgaagtgaacacgagtcggcggcaacagaagcaaactggtagcgaagacgcgcagttgtgaagataaaagcactagtcggcggcggcataaccagtcggcaacggaagacgatgatgtccatcagtagtggtagctgtataaaccagacgtagaggtgagggcactagtcagcagcagacgagacgaccggcggtgaagaagataaggccaatcaacactggcagaatcatgcagccatggaagtgaagaaaccagtcggcagccatggcaaacgtaggcagcttgtgttgacgatactgatgcctattagtagtgacagcgatgtagccagccgtgaagaaggtagcatcagttggcgttataacaggccagccgtgcaggcggtgacaccagtcagcggcggatgcggcggccggtcggtgaagacgtagacgcccaacaacggcagcataataagtctgccgtgcaggcggaagcaccaatcggtagcggcgaaggcaagccggtcggtgaagacgtagacgcccaacaacggcggcataaaggccagccgtgcaggcggaaacaccagtcggcggcggcgaaggcaagccggtcggtgaagacgtaggcgcccaacaacggcggcataataggccagccgtgcaggcgaggacaccagtcggcggcagcgaaggcaagccggtcggtgaagacgtaggcgcacaacaacggcggcataataggccagccgtgcaggcgaggacaccagtcggcggcggcgaaggcaagccggtcggtgaagacgtaggcgcccaacaacggcggcataataggccagccgtgcaggcgaggacaccagtcggcggcggcgaaggcgagccggtcggtgaagacgtaggcgcccaacaacggcggcataataggccagccgtgcaggcgaggacaccagtcggcggcgacgaaggcgagccggtcggtgaagacgtaggcgcccaacaacggcggcataataggccagccgtgcaggcgaggacaccagtcggcggcggcgaaggcaagccggtcggtgaagacgtaggcgcccaacaacggcggcataataggccagccgtgcaggcgaggacaccagtcggcggcggcgaaggcgagccggtcggtgaagacgtaggcgcccaacaacggcggcataaaggccagccgtgcaggcggaaacaccagtcggcggcggcgaaggcgagccggtcggtgaagacgtaggcgcccaacagcggcggcataataggccagccgtgcaggcgtggacaccagtcggcggcgacgaaggcgagccggtcggtgaagacgtaggcgcccaacaacggcggcataaaggccagccgtgcaggcggaaacaccagtcggcggcggcgaaggcgagccggtcggtgaagacgtaggcgcccaacagcggcggcataataggccagccgtgcaggcgtggacaccagtcggcggcgacgaaggcgagccggtcggtgaagacgtaggcgcccaacaacggcggcataataggccagccgtgcaggcgaggacaccagtcggcggcgacgaaggcgagccggtcggtgaagacgtaggcgcccaacaacggcggcataataggccagccgtgcaggcgaggacaccagtcggcggcggcgaaggcgagccggtcggtgaagacgtaggcgcccaacaacggcggcataataggccagccgtgcaggcgaggacaccagtcggcggcggcgaaggcgagccggtcggtgaagacgtaggcgcccaacaacggcggcataataggccagccgtgcaggcgaggacaccagtcggcggcggcgaaggcgagccggtcggtgaagacgtaggcgcccaacaacggcggcataataggccagccgtgcaggcgaggacaccagtcggcggcggcgaaggcgagccggtcggtgaagacgtaggcgcccaacaacggcggcataataggccagccgtgcaggcgaggacaccagtcggcggcggcgaaggcgagccggtcggtgaagacgtaggcgcccaacagcggcggcataataggccagccgtgcaggcgaagacaccagtcggcggcggcgaaggcaagccggtcggtgaagacgtagacgcccatcaacggtggcataataggccagcgtgcaggcggaaacaccagtcggcggcgatggaggcaggccggtggtggagtcgtagacgcccatcaacggtggcataataggccagcgtgcaggcggaaacaccagtcggcggcgatggaggcaggccggtggtggagtcgtagacgcccaacaacggtggcataataggccagcgtgcaggcggaaacaccagtcggtggcggacgtggcggccggtcggtgaaaatgtagacgcctgacaacggtgttgtgaccaaccaaccgtataggcgaagacaccagtcggcggcgacgacggcgagccggtggtgatgttctgactgatccattcctggagcgtaagagataagcttaaagccatgaatcccttttatgcatatctggatttggatcctgcagaacaaacatataggatgagtagtatctgatgtaaatataatactcgagaaaaattcaggcagtttataaatacgtatttcttctcttgttaattttgatttccccgagcagatgactcattacgtttaaacactctgcccgactagtcatagccaccaagcactgggagtcggcctaagcacttcccaaacatgcatatgagtgacatgagttcgtcattaatggaacaaagtttcacggatcggagtttactactcgggtacttttgcaattattaagagcagaaaataaattatcttatctctatgcttttgatttattccgaataatacttagcaccttgcgttactcggtccatccaacgagcccccgggtgctaggaatcggcccaaaggcaaccatccattggcaaaccaaacggaaagcataggaagatagaactccataactcgataggtacttttgtactcagattatgtcgcaagcaatcaagataaatattatgaaaaatatgatataacatctgtagcccccgactcactactcaatggaagaccaattggtatagtgaggcagaggaaaaggaaaaatatcatataaagaataaaataaatgatgacttagctttgtaatattccccttggtgatggcagaagtggccaatgtgggaacaaagtcgtccatcaataacaatgaagacaccagtcggcggcgacgaaggcggtcgacggtgaaagcgaagatgcccactaacggcggcataataggccagccgtgtaagcggaaacaccagtcggcagcggtgaaggcaagccggtcggtgaagacgtagacgcccaacaacggcggcataaaggccagccgtgcaggcggaaacaccagtcggcggcggcgaaggcaagccggtcggtgaagacgtagacgcccaacaacggcagcataataggccagccgtgcaggcggaagcaccagtcggcggcggacgaaggccagccggtcggtgaagacatggacgcccatgaacggtggtgtgaccgaccaaccgtataggcgatgacaccagtcggcggcgacggaggcaggccggcggtgtagacgtaggcgcccaacagcggcggcataataggccagccgtgcaggtgtggacaccagtcggcggcggcgaaggcaagccggtcggtgaagacgtagacgcccaacaacggcagcataataggccagccgtgcaggcggaaacaccagtcggcagcggtgaaggcaagccggtcggtgaagacgtagacgcccaacaacggcggcataaaggccagccgtgcaggcggaaacaccagtcggcggcggcgaaggcaagccggtcggtgaagacgtagacgcccaacaacggcagcataataggccagccgtgcaggcggaagcaccagtcggcggcggacgaaggccagccggtcggtgaagacatggacgcccatgaacggtggtgtgaccgaccaaccgtataggcgatgacactagtcggcggcgacggaggcaggccggcggtgtagatgacgatgcccatcaacggtggtgtgaccaaccgaccgtataggcgaggactccagtcggcggcgacggaggcgggccggcggtgaagtcgtggacgcccaacagcggcggcataataggccagccgtgtaggcggaggcaccactcggcggcaacgaaggcaggccggcggtgaagtcgtggacgcctaacagcggcggcataataggccagccgtgtaggcggaggcaccactcggcggcgacggaggcaggccggcggtgaagtcgtagacgcccaacagcggcggcataataggccagccgtgtaggcggaggcaccactcggcggcgacggaggcaggccggcggtgaagtcgtagacgcccaacagcggcggcataataggccagccgtgtaggcggaggatccactcggcggcgacggaggcaggccggcggtgaagtcgtagacgcccaacagcggcggcataataggccagccgtgtaggcggaggcaccactcggcggcgacggaggcaagccggcggtgaaatcgtagacgcccaacagcggcggcataataggccagccgtgtagacggaggcaccaatcggcggcgacggaggcaggccggcggtgaagacgtagacgcccaacagcagcggcataataggccagccgtgtaggcggaggcaccactcggcggcgacggaggcaggccggcggtgaagtcgtagacgcccaacagcagcggcataataggccagccgtgtaggcggaggcaccagtcggcggcgacggaggcaggccggtggtgaagacgtagacgcccaacaacggtggtgtgaccaaccaaccatataggcggagacaccagtcggcggcgacggaggcaggccggcggtgaagtcgttgttgttatcagcagtggtggtggcgaagacaagccggcagagtggactcgcggccgatcgaccggaaagctgagacgcctcgagtccatgaccagcatcaatcgcctcaatagtgccgcgtaattatatgcgaacaacaacaaaaaatagcaagagattaatctgagattaaaaatcaatatgataaataatgataaaaatcagattgagtttccccctgactgatttggatcaagtcagagaagaggagcttgaagaagtggtcgacggaaaggaagtgaaaactcccaaagcgaaaacgaagtcggcgactcatgaaattgattccatcgcgctcgttgataggaaactcgacgcaacccctacctggcgcgccaactgtcgaaacatgaattcggcaataataaaagggggtagcgtacgagacctaaagtggatggatgcagagacaaaggatttagacaggttcaggccctctcaatgagaggtaataccctactcctgtttggggatttgaatccgccgagtgtgtattgatctgacgatcaggttgtctcatgcccctagaggggctccctgccctccttatataggttggggggcagggttacaagatagaaaccataaccaatacggtatcggtttcctaaatctactttacaatcttatcaaaccaggactttaggccgttccataatatacagggaaacgtaatacccaagtcatgatctgttacatatttcatatatataagttatcccctataactagtcggataaccatgccgtgtgggtatggggtacccataatctccacaactacactgtctgcgacggaaattacctacctggcgtgcggcggcgcgtcgaggcaggaacagaaggcgtcgacgtcggcgggggacgcggcgtcgtagaggccgaacgcctcgtacagcgggttggcggcgctcggcgccatgtagccgctgccgtggatgacgtcggcgttgcggcgcttggcgtcgccggggaggtcgaacagggcgcgcacggcggccctcatgccggcctggagctcccgcggcacgccgtggcccgacacgcggaagcagcccaggcgccgcgccgcgtcgcgcagccgcgcggcctcgccgggcgcctcgccggcgagccgcaggtcgatcaccgggatcttcgccgccatacggccctgcgcgtgcgtggtgccgtcgccggtttgttcacgtcgtctgatggagagtgatgggtgtccacggcatcgacttgatgatgtgctctgtcgcgggcgaatgaaccgaattaggctgtgtttagttcagtgtaaagtttggattttggttgaaattgaagatgatgtgactgaaaaattatgtgtgtatgacagattaatgtgatggaaaagaactgaagtttagatccaaactttatatctaaacacagccttattggcgccgcgtactgaccagttagcactcgctgtctgggcactgaatccgtgtgctccaaatgcagacgagcacaagtcagcgagcaaaggctgcttctgtctgttacgacatgataacgtgttccacactttcggttctccactttcgcagaagacgataatagacatcactatgggatttgagatttgaagccggacgacatgccaggctaccagctctttcatgtctttctaaacggacaaaacgaatgatcttcaatgttcaaacagaaacagatgcatgttcaaacggagcctacttcaatgatgtaagaggggtcagagaatagacaacagtcatcctattcaccataaagcaacgaaattgacatgagaaatttctaaacatgctatacacgtatacagattgttagttacattcataaaacttgtgatgcgtaacaggctgcgcaatgggttatattggtattgaaatctcatggttgttctaggcactggaacgtccatggacggtgtgatcagcttttccatctgtagttagactgaagtgtctgcttctgtcctctgtaccttatggctattccatcttggatttcttggtgaaaatattagcagctgataagcaggtaattcctagcaacaccacggctatgacaagaactacagaacaaaaaaaaaacaagaaatatatcaacacaaactagatctcacaaaaataattcgtaaatagaccgtgaaactggatgatttcaagagcaattgttatgtacttcatccgtttcatattataagactttctagcattgcccacatttatatatatgttaatgaatctagacatatatgtgtgcctagattcattaacatctatataaatgtgggcaatgctagaaagtcttataacctgaaacggagggagtatgaagaaaagagatgtctgaaaagtttgagatagatatagacagcataccagcaattgtaccaaacaacaacagagcaagacggtgccacactagccatggaagctctgtttcgagagcgcaatgccgttggtacgaatgcccttgttttgtaatggcatgtgcttttgatggatccagttcagatataggaaactccacaccaccaacagagtttccctctacatctcttagttcgagtttaatctggggaggcactgcattccaatctatttcgattgctccaaagtttggttgacctgataaatgcaacagcaaaacaccaattgataaagtaatacacgtgagatcaaatacagaagaaataaattagatggacacattattatgctcatgggtaaatctgccctcttgatacttattcagttatttgtttcgaagaaaggaaagcttaccatatgtgcatgatttgtaacgacagttagggctaaagactcgcaaggtagttggtgtcaacaaagccacaagtctcataagtggttgaaatactgatggcacggaattctcaacagattgggtaagaccacttgaggtaatatcatacaatggatattgagctccacagtcataacgagaaatttctccaaaatgaacatcaccgctgataaaaaacactccatttctctgcacaaagtcaacatatgttccatagaaataacaaatgcataagataagtatccattttagatgatactccctctgtcccaaattacaaggcctatttttttacacggtcttcaatgacatacttcgaccattaatttatgccatgttattttcctaacgaatatgaaataatatgaaattagcatcacatgaaagtactttaaaatataaatctagtgatataacatgcataatacttagcatatatatggttagtatgattgttagtcaaaatttaccgattttgattttccttgaaaagaggccgtcctataatctgggacggagggagtattgtctattgatagatcgcaaaaagaaaaaaatttaacacagctatatagaagagaaaaggtaactaaacttcacagtgtattacaagaaaagggcacctgcttgccaggagaatttttttttcttttcgcattctacataggccatatattgtgaattgttgataaaaaaatgtttctaaaaataatgcaggaagtacgccagctactactaaatcaatgaattttactttagcacaggtaaaggagaactgagttttcagtaaagattagaatcaaggaatagcttgtctgcataggaaagtaaagtaagcaaccttactgctatcgatcagtctgaacagtcgttctctttcccttggaaagcgtgcccatgactccacatagaacaaaggtccagtggtggcagatagatttgatattacctgcagtgcataggaagaaaattgtattattttgaaacaattctatcacatgcaagatgaagaatcaaaggcaaaacataaatacaaagaggtgaaaaatagtattgttacaactattcaatcgaaagcaactatagatcgaagattttatcaaaaattatctatgtaacaaatgatacataactttagctgggaattgggatactatcatctgccacgaaattgtccaagatggacagctggctatgtttgcaaaccccagacaagataacaagttttatcatattgccagttttctttatgtatgatgttagtttatggcattcactatgattactcattgttctctggcagatccattttttagccagtattctagatccgctctttcaattaggacaaggcagacaatatcttacttgtattgaagatccaatgatggtgatctctgatcgaggaccatgcagttccctctccagccattgccactgaggatctcccagtacagctccatcacttgatagagggtctctgtgatatctggtgtccaacagaattacctatagtaatgtatggctatcttttaatacatgtaaagtaacaatggagcagtgcctgcaaccagttctgcaaatgggtgaaacttctcaactcatgtactagttatatatttgttgtggtgcgtcactatatggatttgaactgaatagtttcacccaacattaaatctgtatgtataggaaaacaaatatcaactagacacaatatacatctgtattcagtattcacatagtaccaagttgctgtaaaccttgatatcacatactaccacattttaaaagatgctatgaattccatttaaggagctgaaacaacaaaccaaagactactgattaacaagaagttgcagcacagggcactttgtaatccagaacaagaatggcaagtgcagaattcacagtgtgatctaggagattgatatgtaacatggttgcaaatcataaggttaacaggggaacatgccacatatggaaaggagaactgatacattcatgcatggggatgcttgcttgaacaaggggtttccaagaaaaacaaaattggcagaaaaaattggacacgatataactttacctttacccgttttccttcagggccaaacatgtaggaggcataaacaccagcttgctgcctcctaaataaacaagaaagagagcgctatgagatttctgatggtttacaactatgtattcagaccgtagaacctacacaggtatgttcatatatgttgtggaaaaaaaaacaaaaaagaaagaaagaaatttaacacaataagaagaataaaggcaattttagaatacaataatataaataaatgacaacataacaaatgaacattaggaaaataaaaatcagttcaaatattcccaagtacataccgtgaactatcttcagcttcatccagaaaatctaatagaagcctttgagaggtcaccttcccaccaaactcttttcctgcatcattcagtccataatcgtgatcatcccatgttccaataacctgcaaaatttagtgaatgatatgatattgacatagtgtttccaaccactaaatttttaaaagaggagctgttaaaattggaaatgataacaatgtcgcaaaatctcagtttggatgatacagaaactgtcccaaacatgataaaagtaacaaaatgaacaagcactcttgtttgccattcatcctcagttggatcttatgatcctttctagcatggaagtgattcattaattctcctgcgcctgtatgatcaaggacgtggactcatgggagaaatgagcacctatacttgtttgtaaaacaccggtgacaagatcccacatgtcatcacgagcaccagacacaaagctcgaggtttcaacgcgcaattaccaatgcagcaaaaaaaaaacaaaaaacaaagaaagagcggcagcgagtcttgcacaagctctcacctgagccctctccctgagcttggcgtacccgggcttggccttggccatctcgtagcgcctccgcagctcggcctccgtcgacgggtagaaccgcggcacgttcctccacggccccaccgtcctctccctcccgaacacccggaacggcctcttgttgtcgccgtacacgttgtccccgagccagatgaacacctgcgggtcgaaccccacgacggcctcccacacgggctgcacgcacacacacacacacacacagacacaaatcccatcagatcattgatccgagatcagggtggcgaagggggggcgcatttcgtcgagcacctggggcgcgctctggttggcgcaggagccgaaggcgatcctggacacggcggcgccgggatcggcgcggagggagagggagcgggagaggaggaagaggaggaggagggggaggaggagcaacgcccgcgtggaggtcgccattggcggaggcggaggcgggcgggcgggcgagcgaggtcggggcggaggaggaggaggacgggagaaatggttggagctggggaggagacggttacgggtggggggatattccagtttccaaaggcgtcgcgtcggatcctggccggtgttggttagtgtacgtgtggcgcggtgaaggggcaagcgggtggcacacgggaggaagaaccgaagaagctcttggagaggtactacaagaatggccggtttttttcttctttctttctttgtttttcttttaatgcgtgttggaactgtgtagaaattcacctgtgtcttttctacctaacggatgaatatatagggcctgtttagttccccgaaaatttttcaaaaaaacatcacatcaaatccttggatacatatatgaagcattaaataaaaagaaaaattaattgcacaatttgcatgtaaattgcgagacgaatcttttgagcctaattaggccatgattagccataagtgctacagtaacccacatgtgctaatgacggattaattaggcttaaaagattcgtctcacggtttccaggcgagttatgaaattagtgttttcattcgtgtccgaaaaccccttcagacatccggtcaaacgtccgatgtgacaccaaaaaattttcattttaccaactaaacatgcccatagattatatatacaccttatgttttttcaatgcgttattttttaaataagttcatttttgctccccaatatgtagtaaattaagttttttttaatcattatgtatcagtttgtaaaagtaaaaaatgtattggcaatagataaagagagtaataactatattttgggatttgagaaagtgactgtatcctgatttttttgttttatattgatatgtgtaggaggagtgaaaaataaacttatttttgagacgagtgtgtatgcatgtttcgtgaactcctatttaaaaataaaaaaactttccaggtcttgaaaaacctttttagaacatattctttttaacttagtaatagttgatttcgttcatttgcacattcgaataatttcacaaatcattcatttattgtttcattttattcaacacaaaagaacacataagcaatatttatttcccgtatgctattttaccttaaaaatatactaagaggttttagagggaaaaaaagggcaaaattttggtacgagggattaaaattgttgcataaataaataggtagtctttgaaatttaggaggttttataacattatggctctatcgtttttgtgattggaatcaagcaacttcgtaaagatgtcgctaagaaagctgcaaaaggcatcacgctgttatgaagctcaaggtttctctatccaaagctagaaaaacagtgtactgctagtactcaaacctctggagccccatcaattgacgtaataagtcaaacaaaagtcagaatttgaatttttaaaattgaatttaagatatttctaacgtaatttccttttagcatttgcttacgaggaaatatataaagttttatctataatttatttttttcataataaaccgttttgacttattaggtaatatgggaaccaaaaaggctcttaggctctctttatttaggcttagacttattggcttagacttttaagtcagtttattggcttatatgatttataagccagtaaatttaatgtcctaagtttagtggtggagtcatacatctatcttatataagccaaaaaagcttctccaacctagcttttggcttaatagtgtaagagtggcttatggcttaaaaaagccaaacaaaaaagctgcttgtttatttagtcttagactttttgacttataagttggcttataatcctaaacaaacaaagagggccttatacttatcgccagtttctagaacggtgaaataaactaaagtcaactcagggacagaattcctggatcaaatatcagtaagctagactgctggagtgagctcaacaagagacaaaattatctgcagaatttatgctacggatgtaaacagtctagtagtttcttcagcgcaggaaagctgtactgcaacgttgcttacggctacagtattgtagtagcttctatgcaaagcaaacgaaacaaccagagcagtgactagtctgctcatctctctgtatgatctagggacagcagagccaatttccggcatctgattccaacaacattttctctatgatctaccagccgttccaggctcaaaaagataatataaatagcacagggtaatccataccctgagagcaagtgtctactgtttatagataaggtaaggcgttaaaaatgcaagcctgcaactaaatacagccaagagctttgttgcatacaactcagaaactcgaggcattttcaacacaagtacctaagttacatcttgtctggattttaaccacacaataaaggtaagcacatgcatcagtttatgtttccccagatagctttccctgataacctgatgtcacctttgttgctcgtcatccttgcaaaggtgttggagtatttcgcttccggcattagtctccgagcaaaaggattctagtgggcaaggagatgcatcccatttcgaaggcttagaaacaaggttctccactatcacgcatgtcatgtatgtatcacatatgtaagttagtacacgaataggtcacacaggctctcaaacaggtgggagagactggcatctatacacatcaaggaatgttggccatggagcgcctaatttccttggaatggtagcagcgcaaaggcaagagcatccatcataaacccaacctaaactctgccagacatcatgagaaagttgccttcgatcctgcgagattttgcaacactgaaatgagatctgtaaactggataattcaagggagttgccactaaaatccttaagagtattaatcatgccactttttgtgaaaaaaaaaagaatagaacgcaaaaaatacagaaacgattgtgagcttctgactgacgtaatttctgaaacctagtggggttttttttacactagaaggtttttgtaacacaatgaacttggcaacacatttcaatcttgttgtttcagtgaaaaaatagaagagtggtttgtttattcaagaaattacaacagtgatgatctgatacaaccttgtctacaatgtttagaacttagaacaatacatttgcagatgataatgactcgaactacttggagttgcaatgaaacaagaaaacttcactctttttcttcagatatagatgagacatatacaagcatgtaaactagagaatatgagtgttggccgacaatctcttaccttcagtttttatagcatggagatctgctagatggcgcattgttggcctcccatgagggcaattccaaggggacctcaatcctgtcaaattcttaagtatctgaagtgcaaaagaaaaatgctccatcgagttagattcttaagtatctggagtgcaaatgcaagagggcttcattgagttaggttcttaaatataaaggaataattgtttctagggagtagtgagcactgatcacaactaaatcatgacattaaatttctgaatagacagaaaccatacaaggtttgcacttcttttataggagctcatttggaggttacttcatcgaaagctaatttactccaaaaattatccttaaaaaacaatttgatctgtggttaccttcttcatctcagtttttgtcaatggatcacctatcatggtagacattcggcaagccctcgaagccaacatagcacgaacccttgaaggacaaatagaatcagttctgtcgagcttgtaactgctgattattgaacagtcaccttgactgtcagcaagcatggagattaactccttcacatctaaatcaagggaaattagaattaaaccacttttcaacgcacataaaaatgtacatttcagacatgagaataagtgataccttgagcaccaaatgtaatattcttgctgaagggaacggcttttataaaatagcggttgcaaggtgaagcatgcagatcttctgctaaaacaaaaccgttctttctgacagataaaaaaaatagcaagtaaagctttgctcactcttaattatcaactactcactccattcataatataaggcacaaccacctttttttcgatgtttcataatattaggcatgcatatgcatgcatgcatgcaattaactagcacatccctctcctctttatttctttttttttaaaaaaaaaatcacccacccttaaaatctctaatcccattgggtgcatgcattgtatttattggagtgatcccattgggtttatgcgttagtggtagttgtgccttatattttgggatggagggagtattgttgagtgagaaaaaaacaaatcgtgcatgattccaggtgttatgcactaagtgggaaacaattgactgaccgacatgttaattacttcctctggtcataatatttgatgctaaggacaagatttggttaaactttttatattccaaccgtcaattttatatgactagaataggttcataaaatctaataagtttatggtattatgatagtagtactttttgaggcaaatctgcgtacaccatttcttttgtttttacactaagcatttgagaaattatcaatgtcagaatttcaaaagtttgaaaaatcttgtcctaaatgtcagtcaaatatttgtgaccgaaggtagtagacagaactgagttgtaatacgcaataaatgtaatacctgatagtgctcatgttcatagaaacgataacttcttcctctggtgataggtcaagtctcagtggtctgtatttgaatacaatcagatatacagtaccagagatacataacaaaaggtaataataaacctgatttcaacattctgaatacaaaccacaaaacaccctaccatttaataggtactgaatgagttcaatgtaccaaaataacagatggaaatgataagttttgcttactcactgaaggagaggctgtatgtttaaagttgttgactgtgaaaggttctcaaagttgtacttctcatcagcagcatgctagtaagaagaaaaaaacattaatcaccagacatgactacataaggtatcttgaaggtgcaacccagatatccaggggtttatacaatactatgacatcaattaatagaatatgtatagactatagagagatacctgatcaacaataaataggtcctggtccagctttccaatgataaaaccaagattaaactgcccaacaacctgaaggtgtactagttatttagtgttcataaacttctttagcaaagtactgcaaatagaaatatagaattcatacagcactttttttaatatttcatcctatttagaacaatgaaatcacaccactcaagtaaaaaacaaatgttcacaataataaaatgctttcagataaaattaacaaaagacaacatatgtcttgcgaggaacttgcaagaatcacacgacctatcgtacttgatagggccatgaacagaagcaagctatcaaagcaccaaaattatacaacaaataacagttatatagctggctggtcccactaaagaaacaaaatgtattggtacaacttaatttcatgattgacaaaagtcattggggttcctccgaagcactgagctactgagtatataactataaaagagttctttttgaaatagcacttaaacgacaaaaaggaaaacactcgcgcagggaaaataagcaacattatcacttggataacaagtgttctttcattgacagtatattagcagtataatctcacaaggaaccttagaaaactgataatattcaaatttgaagttaagtcaagcacctccatttctccaaagtcatctttactgaaaagcttatctaactcgctggtggctgcagctaaagaattcgattttccctcctcgttatctggtacatagttatccagtgtcgcagctttataacacctaggtaggaaaaataaactagtaattcataaagcccagcgcctggtgaaaacataacttttctataaaaatagtttcaagtgctaccttgttgatttctcaggaaaacttcctttttttgcatgtgatatcataaaactatgccttcttcttcttctaagatcagcaagtgtaaattgcataactggataagatgattgtccagaatgtgctgcagtgtcatgaccatcataatgagcatcaggcaaggaaatatttgtcagtttattttggggttccacttctgaacatcgactgggagcaccaaacttggaatggcatggatcatgctggttatcctgcgaggattgcagcatttcattgtatagtaaatctcatcaacatatgtttaaactaggttctcttttctttgaactggacacatgcccaatcacaatttagccaatcagaaaaaaagctattctacaaacattggagtacttgtttagtgatccaaattaagcagaagttaaaatagctaagagtagattgaagatgacttgtgacaacagatgagaaattcaccatgaacttctttaaaagataagatcacaaagcatacacacttaacaagaatgcccagaacaaccagtcaaggcaaataaagcaataaaagtaataaaaataaaagataatggagaaaattgaagaattcactccaaaaaattctaccttaccacttcagattctgtagcgtgaacatcacatggacgcaactgaggcacttcatcacgatgagaaacaatattaggtggttcagaatgctgtggtgaatcttctggcatctcaggtacaaaagattgcagggaatggtgccgcaaaggatttgttccttgaggtgcattaacctctggaatattagatactcttgaggttagtgcagttggtgaattcactcctaaatctgttctcctcacttgctccaagcatgttccccttctcagcactggagcttcagaaataagattgcaactgtcttcgtgtttccttttattttgtgatagaaatttcataatagaaggttgaacagcacttgaaggagaagactttgcagcaagccctgttctaacatgatttgcttgtgctggataactttttactcgtgtaggcgtcttttctcgttgttcataccggtaggctgaaagcaaagtagatctatcaagctgagcaggtgggcctcttgacaaggggctcacatctttgggtgtagatccagtggctacccttgttgtcactgaagaaggcactttctgattctctggtgtaacctcatcatcactatctgtttcatccatgtcatcgtcattttcaggagctgaaacattctccttttctgttaaacacatgtcttcatcagacccatcgatggctgggtccatttccttcccaggatcttcaacgctgttgatggagaaactgcattgttgagggcagtacagattctcaataccttcccgtaaagatagcaaaatggcatgctcagatgagaagaaaatttttctcttatcaggcgcaacattcacatcataagatgtggttggaatacagaaattcaatacagccacagggtattgcttggcatttgagcttctgtacagctcattgacaagtttggaaacctttggcatatccacaggtctgccattaacatagaagaactgtctatcccctgaattgcgaccactaccaggtccaggtttggaaagaaagccatcaacttggcagccttctgagattgtcacattgaagggctgcaggcacttgaaagtgttcagaccaaatacggtaatgatattatctttcagtgaactgctcccttgagtcctaagcaccgccgatttagaattcttgccaacagtatttgtgcaaactaatctgacccctttggcaatcaacgcataggcctaattagggaaagaaaaaaaataaatcacagttcttagcagaaccagaacgaaacatgtgtagagtaaaacagcagagtggtataaacatgtgtatcaggagatgaactagattctaataacatacatgagctttacgcaaattgaaatgcccgcaaaacgaacatggactaataagatgggcagctcacattcagcaaggagatcactttcccgtactccttccgaatgttcctgctgaactccttgctccggaccggcagcgtggagaacagcttctcgacggtcacggcggtcccgaccggccgcgccatcttcctctcgccggtcaccacgcccgagtgcgcgaactccaggcgcgtcccgacgggctcgtccttggtcctcgtctcgaccgtcagcttccccagcgcgcagagcgagctgagcgcctccccgcggaacccgaaggtggcgacggaggcgaggtcgccgaagtccgagatcttggaggtgtggtgcttcagagcgagcgcctgagaagcgcacatggcggtcagcaactaaatcgcgagagcgaagcagcaaatgggagaggagaagaggggggattcgtgcctggaaattggtgggggagatgccggtgccgttgtcggcgacggtgaaggagtcctcgccgtaggagcggagggtgacctcgacggtggtggcgccggcgtcgaggctgttctcgacgagctccttgacggcggaggagaggtcgaagatgacctggccggagcagatccggtgcaccgccgacttgccgatcggccgtatcgccggcgacgagccgccggccatcctcccccctccacctcgacccgcctaaaaccctacacagcgcggggtttttccctttctcctcctcttccgcggcgggcaccgatgatgatggtggtggtggtggtggccatccgcagccggagccggaggcaaaccgtcccgagggccgaggcccattagcctctcagttgggcctcgatgcggctggtgtgagtgagccggcccagccagctgctcgtcgaacggccgacaaattcgctacgccaaccaaaccggaacgggaataagctcatttgagatcccttaactttcactttgatgtcattttaaatcataccatttttttttaagttgcatatgtttagtttcttactaacttttgataaatatatcagaaatttggcaactgcacagtaataactaaaatttagcaactgcacagcaatatgtgtgagtagcatgtatgttggcaacaaaatgaacgcatccaaaatagccatcttgccaaaatttgacaatattgctaaccttaccaaagtcttggtattgtcaaaatttagtatggtttattttagcaccaaagtaaatagcccttaaatccaattttcattcttaaacaggaaaaccagatactctctccgcaaaactatgtcacatcgtaggttctttttttagaacgaagggagtacaacggatcttctaacttacaaaacaagtgtaaatgagattcttccatattattatcatcttatttgagtgatgtgatacctatgtataatttgactaaagtttttcctttaacatgacgtggcgaatccaactatgccgccgtggcctcgccacctgccgagccacttccgcgaggggggggggggggtgtcacgactcacgagtcgccgccgggtcaggtggagctgcgtggagggggaggccgaggtttgaccgcgcggccgccgtccaaggcagaaacgtgccgttttcgcgttggattcggtggcctctgcgctgtcacacccacccccttccggtttgtacgaattgcgttggcgagggctgcaaaaagttttgcaaagccggacaaaattgaagggcgtgaacgttgattctttttctcttttttttttatgaggaggaaaagaacgacgttgcaattttactcatgcattgtcgtttatgagcaaatatttttatagttgtaccttttttttcagagactgcaaagttgttttgttgttcgggacgttaatacggagtatatactatatctaccgatgtttggactttctttgagaagatatatactaaagctcttagttaaacggatgactatatcttgtactttggtcctcatacaccttatattatctttgtaataactagtttcatacacattatattgcttgccattttgggaaaatttgtctaatgatatctaaaaagtgtggcaatttactgcagggcatcgtgagtactaaaatacaatatccacttaggccccgttcgaatccaccgtaaggagaggataaagtttcggatatttgtggcacgcttttcaaactactaaacggtgtgtttcgtacgaaaactttctatatgaaagttattctaaaatatcatattaattcatttttcaagtttgtaataattaaaactcaattagtcgcacattattaccacatcgttttgcgtgaaacacttaatctttatcttcaggagattaaaacaccaccttagtaatgacaaaacccaagaaaattataccttcgcctttcttgttcattcttctaatattcctcttgcgaaggggtaccagtcgcgatggagctgatttgagccattgggcaccgcctcatgtcgagtgggccttgtgtttgccgcggtagtggtggagtagccttataggagcaggtcttatgatgtcaaagtggttcttaggtggtggctcttaggttagggaggatggagtagtgactggttctataaagccagctttatccatagaccattctcttcaccgagccacgatagggctagttcaagcattagagttcggattttgataatcggcaaatcgagcactagaagactcaaaggtaactagatatggcaacattgttgtcatgctcaccatcaatgccatcttgcgtgaatgaagaaacaagaggaagacagggagaggagaaataatgccaattagtaagaagggtagcgaagccattttagtcaaattctctctccaactttattggaaacattatcttaatggcctttagactgcgcgagtagaatatgacaattgttcggtggcttttagcaaatccatttttttcagagaccaccagtaaaaacctaacttttcttagtgttattgtgagtacaaaattttgtagtcgttggtgcatgacttaacttatcaatatttaaatttagtgtctataaatattacgtataaaaaaatgtgattcagtacaaatttcatgagatcgaatatattaatcgttatgacattcatatctttaagcttttacagtgatgcatgcgtcttcttgtgtatttcattgagtaaagcctctcttttatttacctttttctagtattttttctcaatctataatgagtttaaattaaatcatcacgggaagtacagcgctatagtacggggttgtggccggtgcacgattctaatatattggtactcgcaaatattatatataagtatactttaatagaattccaataataatactagagagttacgtctctttaaatcacacgacagagtgtgatttatgtcatatgggtttttcaaattatatgccatatacggtgtggcgttttcaggctctagggagtgtgtcctagcttctcgctcaagattgtaatcatatccctgtttcctcgcaaaatcataaagtcatttccacttcctcacagagggtgcacctaaaaattattaggacgatttatttccaaagaatatatcgcaaccgttatctctctctttcttcggtcacaagaaatacagaacatgcttaacgaaacaaaaacgttttctttttgcaagtggagaataacaaattagcaacaacaagctgggacatgtgaaaggaatccaaataatttacccggatactaaacgaatttccgaattcattgaggaccggaaacaaacaagtcctccgatataactagaggcaggctggctttctccaattgcaattttgcaacgagagagaagaaaagagctcgaaaaaaaaaagaaagaagaaaaacaaagcgcgtaaagagaagcgagagaaatcggagaggaagatgggggaagaggcggcgaagcaaatggcggaagccccgggcaagattgaatccatgaggaagtgggtcatcgaccacaagctccgcgccgtaggtaaaatatctcgtgaatttttcctgggatttcgatctcctccgcgcggatctgctacttttctgttgtttttttttcttttcttttctgatgtacgatttgctacatgcgtcaccaccaaatccccaatccatgcgtcttcccgatagaagttcatcggctttctttatatgattttatctctcaatcttgcgaaaaaaattatgttgtgtattctatttaggattccccttttccccaaattttgagattgattttcccctcgtgtttttggatattttctaactattttacgttgcttatgttatgtgtttgtgagtgaaggttgcctatggcttactgggatcagcagctcgattgcgtacaactggtcgaggcccaatatgaagactagcgtcaagatcatccatgcaaggtttgtgcctttgtctcatctatcttagcttcaggctcgtgtcttaccatgattaagaatacacggattattcatcttgagaacgctttgtaggcattgtgatttgtgaacattagcacaataagataaaaggattttgaaccttgccatgataattaaaaggtcgattgaacataatgtttgcacaatagaaaagtgattctgttgcacatgccttccagattgattctgagttatgaagtgacttgagcaacttcgatttcaactgaaaccagacagaattgctccaattgggtcatcgatgagcctgtaggaaggtttcaacgtatagtgtagcattgttcaacagactatagacagtttggctaccatttaccattgccagctgtagttgaatatggagctatggatccttcttttattccattggcatggtttggaagaactttacttccagttaattgtagagagtgtacttgttttttttattgggactacaagctagtgattattagcaggcagccggggaccactagagataatcaaaccacgtaggatattattatagtccacggggttcataatttgttcttcctgaacagtaggtcttttatttgttcgtttacaattatcccgccaagcaagtagatataagacctgtaaaggttcactgttgaggcttttctcctcctcttatcaatacaaaagtggcaaagtttttgcccttctttcaaaaaaaaagggtagacttaagaatgcaccattatttatttggtgaattatttgattttgttgattacattcaacactgaagggcttagttatcctttaaggttgcaatgcagaccattctgcaggaaacgcaggaaacttgaaatttagtaacttatctgtttaacttgatattctacctaggtggctatgcatatataattttatgacaaaacgttgcttgtaattactatttttatatgtcgctagctgtacgaagtaattcacgtgaccttttgtcactaagatatctaaggttggaagtgtatcagtattattatggactggttttcaaagattccttggtctgcaacaatagcttcgtttttttgtgtatagtgcacttacaattatactagtccatccgatccagcaagtcaaaacttagatcagcagaaatgcattgtccaattccatatatagcttgtaccttgtagcatttttgtcctgtgaaagtgtgcacccttcactgctggccctcataattttctctgttctgttccccattttttttgggctagattagataggtgcataaagcaatgacacctaaatagaagccatgtacatacggaccaccttctttatttttgaacggtttgattactattgttgagaccagagggttagaattctaagttgctattttccaacgcatctactagcgatattaccacctcttttttgaagtcagtcaatgtagtaatgcactgagtcatgtattaaatctttgaagttctgtttttcctcgtagatgtaaaattggcacgaccttaaccccatctaacgcattgggtggcaatatcagatatttggatctgaatgcctgtaccttttcatgtatgtaggcagtttatgtacgattaactacattccatatgattatacaccaatgagttgtgactaaagtcaatcatgctacaaattgacagcccacatacttaattaatataactgttattattgcaggttgcatgctcaagccctaacactagcagcgttagtgggatctgcaatggtagagtactatgacgcgaagtacggcacatctggaccgaaggtggacaagtacacaagccaatacctggcgcattcacataaagattaagatcttcatattcgctgttggatggcgggttattttaggttcattttggggttcctatgagctccccatgatgattattttgtctccttaactacaaatgaaacttgccagggcattcctgagcaacgagggtgtaatacagggttgatctgcatagatcaatttcagattgcgatatgtaacctcacttgctgacaatcttattttattatttttcaacgaggaaaagtgttcctgtcttgcattgaatctgtcttagttttctgcagttgaatctgccgtaagatagaatggtccacggattttgttcttactgtttgtaatgcaggagcattccccacccgtattcgcattttcaaacattcttaatcgttacatagttgtagatggatggcattttcaaacattcttagctcttgattggtacaaactatgtaatttcaaaagattttgttgtaattaggcaactctgtaacttctttattttgcttttataaagtatggatgaagctcaatacaaaataaagttacaactctcgtggttgccctacggggaaagcagctgctgtgcctgttctcagtttgttcaaggagcttttctacaaaaatcagcattttacattataatctgaaaaggacatggaaactaaattttaaattcttgaatgaatacacgaaccaaagagagacaaaacacatgcaattattaagaggttctttgttttcttcaaattatcagaacacggaacgtactgtctttccctatgtttgtaagtttcttttagggctgcctggagcaaacatgatttcttttaagggctatctggagcaaaacatatttgaacgagtgctttaactcgtgctgattaaaaatagacagaatgcaagagttactgaaggagtatgaagaaaatctctgaagattccattccaaaactatatacatatgttcaagcaaatctataaatcctgcagacagaaataacctgaacaagaattaatagatctcttctgctcttctacgcaaggatgacaaaggaggttgtaaccagtgacgccatccatctatctgaccaccagtgtagaggacatcttcaacagtaaattcattgcagattcaaatataagaatcacaaagtggtggaaataggaatccatgctacctacgcattcctaatttcgcctaagctgctgtgggttaactcttgattccagctttctcacattgcgggcgatagcagcttgcttttggccaggaatgtagctcttccgtttactgcacaaactacaaaaaattagtttttgtaacaacacaagcatctgaaagggggaaatggcatgtgtatggcattaagctagagagccaaggaagaaaattgcaagtttaaacgaacacacggacataatccaaagttttgtgtgatctttcataagatatttttgtttgaaataggcatgaaaagaaccaattcttcagatattgtatcaagttccgaccagtcacacttatctcctatacctgttatttagaatatgaaaataagaaagagatataaaacctgataaatataaggcctgctgtaagaaccattcctccaattgcccatgaaactctttcactagcaggcatttctcttgcccatctgcgaaaatcttcaagattccaagaggccacatcacttaatactggacgctcttttgaagatgtccatgaactagagatggcatcaaaacttgctttcccaccatagcagaaagtgtcatccactccacccgaggtggtctccaaagcttgcacagagaaaccagcagagcgacatagctctgtgccattagagacccatttatgtgctttgccacaaaggatgtcacctaaaccacatggagacaatgcctgataaagcagcaagggggagatatcagaaccgaacaacaaaataatatccaacaaaaatatcacaagaaagcagaggcacagctacttacagttctgcaagcaaaggaataaaaaaagagaggagctaccgtagctataagaaagtacaaaagcaattaacatgccacaactttaacttaaaaactcccgtggcatgtatattggtgtaagcacgattaataactgtttatctatgatcaaatttcacctaatattatctagatcaaactatgaattatgaaatgagcaagtataatctggcaactgcaactgtccttgtaaagtaccacatcggtatagcaagaaaattttatttagacacagcttaaagagatgccctttacctgtgttttcacatcgatagcgaagtacgcctctgagcaagctttgaaaaccatgtcacagaatgatgcacatataactggaggtccaggcctaacacccacccgtggatcacaaatcgaacactcgagcagttcccacagatgaaggcattcttgactaccttcaccagtcgatgcaagctttctcactgagagcagggcagaaaatgtctgggacacatcgcaacacgtgttctgccggaatactctacatagtgccagatctctgcgccccttagctgctcttccaggacgcttaccttcagatgagaaggcagggaatcgtccaccaggcgaaacacatacacctttctgttctcctgtgatgccagacaataatgattttagtcatagaagtatgactaccatggttttcatttgcagaggctcaaacaataattaaacatgcctaaattcattaacataaactactccattcgatctcaagccacaatgttcataaaaaactatagatttcactcaagtaccaccttggtgtccaggtaccattgctcatcctactcctagcaggatgcaatttgaagaaactgtgatattttcccctagtaaaggctggtaatgactgataacatccatcagaagtacaaacaaaaattcctaagcagtaattcctaaaatgcaaacaggcggcgtttaccatacaccaaattccacgcagcttaactcaatctacgagcccacagggacctacgctactgtctctgggtagaaaagaaacacacacccaatttcaacgaccaagcacagaacgcatcaaggatccactcaagggcaccacgaaccgtccaagtaacaaacaaacacatacagctaacgaccaacaaaagctacagataaaactaagcaagaacagcaccgagatcggaagaagagtcgcggtggggtggcgattgtcccgtaccagctgacgcggctggcgagcagacgaggagcagcagcaccaggacagggagaagggcgagagcacgacccgtacgcgacggcgcggtggggctcatcggcggcgacctccccggcggcggccgcggccggccgtcgtgcggcggcgtcagggccgggatgggatggggagaaaaaaaaaacaaaacaaaattccgcagcccactactcgtggattcggcttgcggcgtcaatccgggccggaaaaagtcaacaagccaaccgtgccgcatctcccgagccaccacagccgttcgatctagcgttgcgattcgggcagttccgaccggcatgggccgcgttgctggtcctggacaagttaatgggctggtcgcagcgggaggcccacctgagcgacacagagatatgagtaggctgtagggacccggacctccctaccacgcctcgtctgctttggagaaatttggatatatgctattgtcaaaagtgagtttgaatgttttaaaatatgcatcatgttgattccttacctattactttagtgattgtgtgaatttagacaaatataaagtaaatttttaatctaaaaaattaatcgaatggtagttttttttagcttttaaaataggatcaaatacgcaactgatgtttttttttttcaattgatataaattttgctggtactgttgctggccgcagagtgaattgctacttgggccgcaatgtagaattgctacttgggccgtcctaccaagtaggcaagcacactgctcgggaggtcgggattttcttttcttttttttttttccgtcgcttcttcgcgccgcctcccctcgacgccggcgccgccgctctcgtgagccaccgccaccgccggcgccgccgctctcgtgagccaccgccaccgccggcgccgccgagcctcctcctccggcaagacgtctcatccaggcctctccctccccctcagacgccgcctctgcgcctccattctcgagatccgaggtgagcccttcttcttcctcttcccctctcctcttttctccagggttccgcagtgacaggacggaggaagcgggaggatgcaggaggggagaagagcctcgaggatgcatcgtgctcctcgcttcgtccacttcctctcctcctcctcctcctcctcctcctagggttgcgttgagtcggtgacacatgggacctcactccctggtttgcttgcagcggcggattgctagctccttggatggcagttctagcttgtagttcttatttgacgaaatcgtgatcttgtgaatattaacatggaacagttgtagctcgtagttcttctttgatgaatcttgatctggtgagtatcaacatggaaggagtggaagctaggtcgctcgctgctcactctacacagcagcatgttttctgatgttttacatttgctgaatactgtcaacataattgaacttttactttgtcattacttggtatatccacagtttgtctcgtcttccacctccggccaccggatttagtgccggtcatggttatagcttgattttgagtcctagggtgtgtgtgatcggtgattcgccaccagcggccatggggtggaggggcgagcaacgggcgtagcaagccgaagagccacacttgtaggagggggcagggggacggagccgtgggtggccggcgaactgaattgctagagctaggcacatcgtcctcaagggcgcgtctcggcacaaggcgcaggtacaatcctctaatgtcatcttcccgtagattctcactcttcaagtctcagttccttggttgtcactggaaaatcatactacgaaaatggaatccactgttgtgtttgtttggtggcatgcatatgtagatcaatatagcaagttcaatcgatgtaggctcgtctgggacactcgaaatgaaatgattttgcagaattcattttgaaaattctcttttcgaagcgagtcataaagaggaatatgcatgttttccccccttttctccctcttttttcgtgatcaggttagtggagagacccccctctgcattgttcaagacttcagactcgctactaaagtgtgcacacccattgcagctttcagggcttcaccactgcataaattctcaacatatgcttgtgttttttttactgtcaagtgtcaacgtctgtgccttttccctgactggtctcatgaatttcccaaatactagaacagtacaggatcatgtcttcaaagagaggaggaggtggccgccgtggtcgtggctgtggccgtgggagaagtgctttggctgaaaatgacatggactttcatgaaacctccacaccttcttccccaagtactacttctgataaagaggacaatgttgagtttactccgcagcaaagcccactaccttgtcttgtaagcccatcagtagagcatgtatccaacacattactcaatccaaagatcaaccaccgatcggacgcaatcttcggtgatcaggttaatctaagagcaattaagttttgtcatagttgcatgagtaacaagttcttgtaggaagaataaactttgcagtctgactgaggtcaatgtttttttgcaggctgtggaacagttgaagttgcgacatcacaaacctttaaaatttcatgagagataccgtccttatttgagggatgctggcttgcttgggctctcacaaatttgccagaagatgcctcagttggacaaggcattgatcactgcccttgttgagcgttggagaccagaaactcatagtttccacctggcttctggggagatgacagttacactacaagatgtctcaatgttgttagctcttcctatcgatggccgtccagtttgttctaccactgatcatgattatgcgcagatggtcattgattgtctaggtcatgatccaagaggaccatcaatgcctggaaaatcttttctgcactacaaatggctaaagaagcatttctatgaattaccagaagggacagatgatcagactgtggagaggcatgttcgagcatatatcctgagccttctatgtggggtgctatttccagatggaacaggacggatgagtctgatatatcttccactgattgctgatctttctcttgttgggacatacagctggggatctgcagtgctggccttcctataccgttctctttgttctgttgcttcctcccacaatatcaagaacattggtggttcattgcttctcttgcagctttggagctgggagcgctcccatgttggcagaccgttggtccggtctcccgtgtgcccagagacagacattccacaggatgtgctcccagttggctttcgttgggtaggtgctcgcacacaaagtgagaatgctacacgctgtcttaagcagtacagggatgaactgaatctgcagcgagcagatcaggtgaagtgggagccgtacttgcacattgagtctgcaagcttgccactgctttgtacaaaaaatgctgacttgtggcttacacaagctccactaataaattttccaatagtcgagatgtatttgcctgagcgagtgatgcggcaatttgggcttcgccaatccattccaccaccttttcggcctacactacaggcgctgcatcgtattagtcgacgtggcagagaacgtgagaactgggaagagacacatcatgagtacattcaggaatgggaagcccgccgacagcgcatatttccagagtcagagcagtatgacccgtcttcttatgaggagtacctgcattggtacacaggggctacacggcggtatcttgtaccatcaatcagtgatgatgtggaagcaggatcttcattacagcctgatgactccattaatcttcattatcaagccaaggctcctatgatccgcaaagcagtaagccatattatctattcagttcctacgatcagtttctaaagttaattggacctaaatttgtttcagatacacgtgctgtcttttgcaagacttcaaatagtttttacaagcagtccatgcataatttaactaatatatttaacttgaaggctgctgattgttgtaggttgataaactgcatggtatggtaaagaaggccaagatagccatggcgtccacagctgatacaaccacacaagccttggtctttgagtttctgcatggctttcaagatgttcttcacgaccttggcgagatcaaggaaaatggtggttcagctactagtccacatgttgaatcagctgccactcaagacatgcctctacttttgctagaaactgaacagaacattgtggatgccgatcaagaagctcaacaccaggaagaggaagagcttcacatggtggatgatgcaacaatgacccttgagcctatggatgaggagaacaatgatttcaacaatgtcatctgtccatgtccttcactggagttggaggaacattgtcacttagctacaccagccatcgatgagtgtaatacagccactcctgctccagactctgtaattccacagcagaacactgattttgatcaagatggacatctggaaaatcctaatgaaatggaccagattgaactgatggtggaacctatatgtgtggatcacaatgattccgacaatgtgctctcatccagcccgtcagctcaggcactggaggagaattgtgaagtagcaaaggcagtcaatggaaatgtcgatccaaccacccaagttactggctcatctaccccacaacaggacacagatgtcaaactagttgctgaacaggaaaacccaggcacaacagagggcaactaactataatggtgtcccctcatctgcagaggagacaggcgattctgatttcacccctcatcatgtcacctttgtatagtgactagttatgtttgccatgttgatttttttgacattagaagttcttttttttgtatttatattcattgatggtagtattctgcttcatctccaatgtaatatgggaatggatatattaagccctagtgtatactgtatactacctccatcccaaaatgtagttacctagtactcaactggacacctcctagtactataaaactggacaggggtgtccaatttcgtactaggtagcaaaattttgggatggaggtagtaatggttttccttagaagatgcttaactttataattgatgagcatattagtgatagtgacagttagatggatgatgctgcatctactactggccaatatgatcagcaagataaagattggagctgcttcatatctccacttcatcaaatttatagaaggtaaatgattctttattatctagtatgaaggtgtacactgaacttgttgctgcactgtctttagtgttagctaatataacttttgcgcttttattagctgtgcccttctcatatacctatggactactgagtcagcagtaaccatttatagtacttgtgtgtcatactgatttaaatgaactgtgcaggtatttgttacggtaaagtgctttagagctattcatggtagataggtcaaatttcttcgatttcgaggtacatccttgatgatactctagtttgcgttgttggaatcatatagcacactacagctgcctaaatattttaaagatgcatatgatttttatctaggatacagaaagcatgtaaacatgcttatttatcgggcaaccattcatacaaaacctccttatttgaacaacattttcctagctacccaggttggtgttcttctgcaaagttcaatgttgaaatctgctcttactggaagttttaatcaattgcatttttatttgagacctgagtaaatatgtaagaagttgcaattgacagagtgctgggctagatgggaggttgatatgcaatcaaccaccttttcagcccaacatgttaagtgtattcaagatttaagtagatctgtccttttgtgcagattagcaattttgactacctgatggaactgaacactcttgctgggcgcagttacaacgacattgcacatgcatgtttgcttcataactctcattttctgatctaataaatctactactgtgtttaaatgatcactagtaatttatgcaataccctgtttttccatggatattagcagattaccactccaaaacattttggatctggaagatctgtctggcgtccgcatactgagatcttccaaaagtggattctgtacctcattccttgctgccaatttggacctcttctgtgcattttttttcttttccattcatttactctggggatgatatcttgttcaataactgctgatagtgatacttcaaaattttcaatgcagccggttggcgctctgaatcctgcatgactggagaaaccccaagaacattactctagtttcaacgacccaatcatcccaaaatttcacctaccgttcacattgctcctgtcctggcatggtaccttttcttagattatgcatgttttgtgtcagcattttgcttgtgtgttgccccttttgtttggagttagattaatttattgtcatcccatttgattaatcggttctctactgttcatcaatgacaatcccttcaggtgttatcgtgctattggttgttgacataagcatctactgcaggtgttatattatcttgtcaggatagagccttttacggccctttctattcagcagcaatgtggcaggtttggtcaatatgatcacacgttttcttgtatcaacagaacatggaacagtgtccttgaagacatgaataatgtaaaaaagttagtgagttttgttaaaaactgtgccctcaattcactgtggtatattgtgcattgcttagcacggaagtctaatcagaatctttggtggaacctaattatggtgattatttctgtagattccagagatattttaccttactgagttacactaatgtgaatttggttgacttagggtcaactcaactttctggaaagctatgtaagttatttcattctgtattacaggctccgtggaattgcctccttggtctcaaccctgttgatttcatatgtaaacacaggaaagctcttgagagtgatcatgtctccgctcatttgcatgaatggatcgacctaatatttgggtatgttatttatgtgttgttcctttttgttgcctcctatgaacaaaatgacgtttccccatgctgatattttgttatcaatgtacttctcttctcagttttgctttggctaacactcacctcataatgaatcgacgagcttgcgtggcttgatttgttaaaaaaatgattttaaaagtgaactcgactcaactctctaagactcgagttggccacgttcgtttcagtttaagattattgcaatctagattattgagccaaattactataaactagattataataaacctacatagagtaagttgttagatgtttatttctttggattattagttatttgttagttgttagccacctaataatctaaaaaaagcatcttatagtggattattagattatagtaatctggcttataggttgtaataatatatcataataagctatttgtttgtttcaacttacttctaataactcaaattataataattttaagctaaatcaaacaaagccttagtccattaaactcatcgaggacacttgctatccgtacgagacatgtgcggggtggctgcgcgctacgccctctcgtgcaggaggccgtggcgctgagcctagcaaaactgcagccactacaagcatgtcggaggaatcccgtcaggagacggccgactctctatcgccatatttccatttgatatgcatctgacaccgatacgacatcagcttgacttcggtgccgccaacccaaggagcaccctattaggcagtagcagtgtaagccccatgccacgtagaacaaatacacatagaatccactcctctcatgcaagttacttcacgggattcccaagccaaccacttttttacctttcccctttcccggtgcttctctctcccattttccccttttactggtgttgagccgaagcggagaggaggcggcgtcgtcaggctcgtccttgcttcaagcggtggtgacgacggcgccacggatctggagcggcggcggcggcggcggcggcggcgcggatctggagtggagcgacgtgggaggacgacgccaccgccgctcgagatccgcaaccggggcgatggccggcggtgttgtcgacgggttgacgatggcgtcgtcacgggctgacgggagggaggcgcggtcgtcagcggcggcggtgacgtggtcgtggcgtgccccggtggcgactccaccagctgcacgagctcccccggtcggtgcccctcctctccattcatggcggcacccgattactctcccctcaaccctcagtggcaccggcgccaacaccgtctcgcgcgcggagaagcctagaaggccggcggtcgaggagctcccccggcgacgcggcgatgagcatcgagcggagcagcgggcgggccttctcgacacggagcagcgacagcgtcctctggcatcttcagcaagcgccgagcggagcagcaaggggccatctcgacgcagagcggtggcggtccggaactccctcgttccgagcggtgacggtgacggccgcatcagcgccgccggattttctcaggtgggggacttggatgaggcttcaccagcttgggagaacaacggcggccacactagtcggcgctacaacatctcccaactcttctcctcaccgagtcctcaccaagtgggtcctgtgccagagttttttgcgcgaggtgttcgttcctttggctgtgtttagattcaaagtttgtatctaaactttaaacttcagtcctttttcatcatattaacttgtcatatacccataactttttagtcatatcatttttaatttcaaccaaaatctaaactttgtgctaaactaaacacagcctttgttgagatacggagaacccaacgtagctatagaccccactgctttttccatcacgtagacgaattcacgcgctacgtaggagcactatcagcgtaggtgtttctcaggcatcctttcccctaggctgtcagggagaccgcagagggtatgcaagaagtgtctgacttggtgggcactattatgtcctttgttaatacgaggagaagagagtgttattgattgtgttaaacatatctagtagaccactctaaaactataattttggagataaattattaagctaaaattatatactcttctaaaaaagatagagtaatcaacaaagacatggagtattttaaaaaagagcattgtcgccgttaattacggtcatgatccgcttcaagaggagagggtccaagagtgtcccagccttggcccatcttatcccttatttacagctactccaggaccagcagaggatcaggagaggagacacgtatgtacacatatctacacgtgggccccacgcagatgagctgccacgtactccactccatgctcgatttgaatccattctccaaagaaagggatttaattaatcaaccagtacattttcattggcgagtgaataataaattattattattatatgatgaatcaagcatcttgatcttccccaaatcgtcgtgcttgatatcttctgcttttcgtttcatttgtgctaattaatctacgtgcgcgcgcgcgtacggctgggctgatcgatgattcgatcgatcagtacgcgaagccaccggcgccggtttgctcgcgcggtacggccgcccgccgccggccggcgcgcaccgcggcgcagttgccgccggcggcggcggcgtcctcgtccatgaagatctgcttgcaccggcaatccacgctgcagaacgctctgtcccctctgcatatatatagccatatacatcaatattcagcagtaatataatactccgtcctaaaatataagaaattttgaagaggcgagacgtatctggtactgtgaatctaaccagtaagtttatctaaattcatagtattaaaatatgtccttcaaaatctattatagtactatggaatggacagagtaatcaacagaagagacagcttagatgcatgccatggatggagacggacggacctgtacatgtagatgtccttgccgtcggcgagctccctgcggcagaggaagcagcgctgcaagaaggagctcatcgtcgccgtcgtcgcagtcgccggagaggaggaggacatcgtctctgggtggctatggagggtggccttgctgatgatttggggaggcctcatgttggggtggtgatcgttcttgtgtgtctcaagaaggacactcaggccggccatggaagaacacacaccaacttaaaaccaaagacgatgaaaattaatagtcaaaatctctgtgtgtgtgtgtgtgtggttgagctcttgtgctctcctatggcatcaagctcttcttttgtttttttgttggggatttttcttctccctggagaggggtggtgtgtgcttttaaaggatgaagtgcgtgtggggtgcgctgatggagcaggttaaggaggcagggttttgatcgattgggatagtgggatgtcactaacacggtgttttgcattttgaaaattctaagaggatgaaaatgtagtcgagtgatattaggggttatactgttgaagttgaaatctgaccatctgcatagggattgtctcatgtcaccaggatttgtttcaggagagatcggattaaaatgagttgttagggagaatactgttgtagttgaaattggaccatgttacttaaaggttgtccacaccattaaattttaagcctcccccatcgtttgccctgcaacttacaagagcaaggctaataatacagccgatttgtaatagttagctctttataattaatacagagcccacttgtctctctcacagagtttcttggttctggtgtccaagccggttgtaagtttgcagcccgcttctcctctcttctcttctccacctcagcatttagccggcctacaacctattattatacttgctctaagttgttatgtctttttttattgtactttattttttagcattatcttttaaatttctaatgacttatacataaaaaattgacccataaattatcttttagtaaattgtacggcttacaatcatcattagacgaaccgatcgacaacgcaacacaaaatttgctttaggacatcaaattagatgatgagttgtcgactaggctaacatcaaattagtcccaaacaatgtaattacataagctatattaattataaattaacatggaatttttaggaatttaaaatttagtcacacaaattaaaagtggtgatctgcgccttgcataaatcatttgtgcagcacctatatttggtggccaagtcccatcccatttataaccccaatcttgccggtagcatgtcaatcaaatttgccatgtccaacctctagcccacattttaagctaggcatcgacaagattagatttagatcactctggttgatcatgagctccactccaagataatattgagtataagcaagtaagcgccactcttttttatctccacagtggagtccattgagtccatgctcacttaattaacttcccagttgctgaagcatttccgcaagtactccagtgtatagcactctaattggagcatggccatgaccatgctgatctagcagaaagaaagatcaatggaggaattgaagaggcttcactaggcaaagagtccatcaaccagcagcacagtggcccaggcaagcctggctcctttcactctcctccctccacgtgtactggggaggactccattgtcgcttgcagcgtgcagatccactgtgccctcatgtgctgtggccttaattggtccgctctgctcagagccggtacgatagcaggccagatataaacatattttaaaaaaaagaaaggaaaagagagaagagcagcagattatagatctatagctagctgtagcacggactccaagatgtaatatgtgtatgacatgtgggactaggtattaatagtatagtaagaaactattatataaattggctattatattggctatagatgatttagagccagtagtgggctatactattcaacttgctcttattgaggcatccctaccacgtccgatggtcatcttctccgcctgttcaatttcgtcgtttggtgatgtttgtttttatttgggtcataaggagtacgagtgctacagcgcatcagtacccttgtggtgtaccactgtactccttggtaccttctaaacaaggttcattgaacttgaaaccatatggttaggttataaaatttttagtgaagtgctcagtttatgacactttggtaaaggggaactcaatgtgacgcgccgcgaagccttccacatattttactcgataaaataaatttctacaacgtgatgacgcggggcatatttttaaagtagttttgatacattaatattctattatcaaccatagaaaatagataaccctataattaacagaaatcatcgacatacataacacataacttgagaaagatcacaacatatgaggcttgaccatgttatggggacaaataaatatctccgaatggatactattagcgggtgtgtatgtataccagacgcacgaagaaagccaagaaaagaggggcaaagagcagcaagcaggacagcacacagatggggctacggagttgggtggtcggaggattcaggtgcaggaggtagtgacctccagcccgctgaaagcaaagatacgtacggaccagtcagagtaggctataagccggctaaatgttgagatggagaagaaaacagaggagagagaaaaaaaacggtctgttaaattacgagacaatctgtgagaaagacaaatggatgagctaactattctatggataagctaaaaaaaggctacaaaaaactttatagccaacggctcggctatatttttagccttgctctcatggcgccgtttgtttgtgcactttgtcctacgtggcgttgtcacccatgcctcctcagcccattggctttggccgctgccttggcactggcagtggctgctgccttctgttggcttcagctgatctgggctgtgttggcaacttggctggctggcactagcttgttgcaaggtagaggagatcaggttgcatctatacttctcgtgccatgaaactagcagctctagctacaagtttcagggttttgtttggaagcataatgtcacactagtcttatgctcggtggagagtttattaggctacctgaggtcttagagtgtgttctaaaatgattttgagattagctacttttcttattcttcgtaaacgtatttttcgaaccgctaaacgatatgtttcatacaaaatttttggacacaaaaatttattaaaataaatttattttttgaatttataataatttaaactgattaatcatgcattaaaggcttgcctcgtttcgcatccccctaaaaagctcagcccaactagctggttagaaaaaatgtggcttgcttcctgtaacacctggcagccacaaccagcacttgtgagcgtaaccttaattagtttttcttaataagggatacaagtttacaccctctgggacaaatatattttatattatttctataaaaattagttccgttcatatgaaatttctctaaaacttctccattcagaaggagatattagttttcatggaccaggaaatcttcccccatgtaactacttgttttttttcctttgcttctacaaggtagaagtgatgtactatgttatccagctgtgtgccacctattcacttgacacttcttatcaactattcttcgcttatgggagacaaacactacctcttatcgattagacacgaccaagaataggagtcattacgtgacaaaattatagggtgatgtgtcactgtagcattaatatggctaatacttgcctactttgatgaaagtaacaactagttcctctgattgggggctattagactagggtccactgaattatgtttgcgctgtgtcatgattctataataatttgtcgttcaattaattatatcctttgatattcggacatagctacggggacacacgatgatttgtaaattatcggatggcgtttcatccaatgtacaaaaatattatatatgttttaccgctcaatgaaaaaaattccagtaaaaatgtatccgatttttcaatatttgataaaaaaaactgtttcaccacttagagaaaaatgtttcaaccagatacaacattcaaacaaactagttgcaacacccaagaatcgaagtgtgcaacatacaatcgaaatagagtgaaacttcaagtacaccaatgtgcaacatgaaaaacaataggtcgcaacacccccccgaaaaaaaaactccaaaaagaaaaaaaaatgcctacctcctacattcttctaccccaaccaatggatttgcctcccttgctgcaagagcttctgattttctatcatgggagccctaccgctgccttgccaactccttcgaatacagtcatcatcgcctacggcctagcgctgtcctgtcaaactttcctccatggaggggaccagtagcggagatgaggaagaggaaaaggatggaggccagggtcccaccacaacaatgtcagagctctcgccgaagattttggctatagtggtagacgaccctgcgcctgtatattaggctaacgaaaaatggcgagagagagagataggggaggggcaaaggggcttgatgcgttcaatggaaagagggaggggaagagagagagaaggggtggcggggcctgacatagagtgtgtttgatatttctttgtcatcggacgtcttacgcgtttttaatatccatcggtatttatttataacaaacttgcaaagaaaatttgctataaccacaatgaaaaaaaaaggtatgcttcactggatagggtccaattctcggttcccatgatcacacatacatgcaaggagaagccatgaatttactaaacatagggcaatctttaaactttctatgaatttttgaaataatttacaagggaataaggagacaagcctgggacacaagcctaattatcttaggcttgtctatgcccctgcatacttgtatatgtttttttatataattctagcaagatcataaaattattattggtgctcatctctttgaacatatgttttataatggaaactttattaaactcaaccaattatggttacataaaggtgatacaaccgtaataagagcacttcaacttcagcataattggacatatattaaggggcacattcatagtgcataatcacaaaaaaatgaaataaaaatatagtaaatatctatactattttaaatgatgttagtggtggtggccgagattatctacaacaccataaacagacacgtgggactacaagcataaggtccctacaaaacgtgaatggccctagaattgcttattatagaaatagtaaagggttatacacaaaaccttcaagttcaccttccacacatagatgaatccaatcttgtattgttcaaccgtatagcttgtgaaaatagacaagggtaaaaagaggtggtctagcaacatatttcagtatggctaccttcggagatgacactatgtgcttaatcgactaacaatgctataaacttgtagtttttgcttttactttcatctcttaaaacatttgttacaggtacacgggtcgtcagctagtttgttgcaaaacaaattaaggtgaaacctcaatattatagaccacccagcataccttaatgccttaaaatttccaattgaagatccgaatacatagtatagctacattaaaatttgtttaaaagagatagggttttttacctataaattattttttcttcattgtttttctacggcttatcagccatgacttaaacaaacagagccgataatgcacaccatctccggtcacaaataggtcatgttttgaaccaccacacactcaccaggacactagtttaattacaaactatttaagtataaaactatgaaaaatataacagttatagttttgaagcaatttatgatcaatacaaatccatctttatcattttaaaaagttaaatccaaacattcaactattgcttcctgagttccgactcgtctcacatccaatatctggataggttggtgatgtaccctacatgtatgtatcatctttttcaacacatcgtcctcaagagtactgacagtgcaatcatggattgacactagtaccaagtaacttttactcaaggccctgtttagccgaggttccgccacctacaactttagattaaatgaactaggagctgaaagttgtgaaacttagcttttccatattatcacaagagactttttccggtacttgaaaatcacgttaaccgttgattaggtacaatccaatggtttacgatacaaggtgcccatagaaaggtacttaaaaaaggtgggccaggtacaaaaatagagattaagtgggagggtatataggtaattttgtcccttggtattatatcaatctaacagatatgaaaaggaaatgactataacatatataagttcttcgattcttctcgaatttgtttcattacgaagtttctaatatggattacatgaaattgtgaacaattacggatttattttgttatgaaaattgatctacacagaacggggaatgtcatattatttgaagttttggtagctcattcatggattaattaagacgtggtcgacaccggcatgctcaggtcgtccgaaagatagagaagaaaaatgccttcaaaagactagcagatgtgatactgtgaatgaccatagatttatgtaatattcctatctcctaataagtaactattataatgtccctgcaaaaaaaaagtaataatgtaagcaacaacagcgagagatgagaattagtgagcaaaagtaatacaagagcaacagtcaatagagtaggggctagcggcaaacaatcaggaagaagttagaagttgttaggactagaaaaaattactaaattacccatcgtcgtgttttttctatttctaaattcacatttagcaatcaacggttgatattcaatagtttgaaaggtacgctgagtacctcccaagcaccttaaaagatctcttatcacaaactagttattcattagttacttcttagaatatctagttcctttaaacagagcctcaaataaactctaaaatgttatatatctcttgtattgtagagcatttttaggagaacattttcttctacttcgatgtaaatatttctttgatgaaaaaaaattcttttaacagtattaacatcaacatgtgaattagttcctcgcacaaaatcttaattacactaaaaaccatccaactaaatatacttacacaacacgatattacggacttaaaccaaacgagtatcctcaataaaaaaccagacgaacagtcatcacgagaacggattgggatcctctgctttcaaagacaccgtacttttatcactgataagtgggtccatggtttattaggtgcacgtgtcagtgataaagacacctacctttgaaggtagaggagcatgatcccacgagaacaagttcaaaggaaaatcctgggtctgcggctggagccaatttgcgtgcttttatttggcaggttgcttcgcaccagctgcagcactacgccacaaagaactgaacaagggcatcacatcacaaagtggtgctcacctttgtgctgtgcttctctttctgtccttccttttggtagcctgtttaggcgatctgttggcctcgtaacgttctgtttgatctatatgattgagtgaaattttaccacagatcatctagtcgattatatatatactggcactgccaacaaatttagatacgtagtcaaaaggacggaggtagtctaaactaaaaatcttgaaataaacttagcaaatattttaaaacaaacggtctaagcaatacagtaaaataaagtttcttaaggaaatgtatttctcgaaaggtagagtaaataatctgcttcaataatctaataatttagtgaataggctaaaaagaacatagccttagctagagtgattcctccaagtccatagagtgttcgaactcggtgacagaactaggaggagggttacggagtctaaatggcacataagggttatttggttgttagtatgggacggcctggctcgtgttgttagcgaccatttttaccaaaaaaaaaaaagagatgtaggtgcatgaacaatataccgctatggtaactggctctagcttgccgcatcagtgaggcggctccgcggctccacatcaccctctatcgtgcatatgtaaattaaaatgaaacaagggttgatataaaaatgtaagggacggaaatatataatatttataggtcccattaaaaatagcatgtactgtgaagagagtagtggcttcaaagtgtcttcatcctatgaagtggtaacaattaattttgggctggcttggtagttggtcaaaaacatttgcagatataaaatgatggtaacacgaaaaggatgcaaaggtaagtttatgcttgctaggtatagtgcggcacaaatcggatatgatgcagcgctaccttgatgcaaagcacacaccacgtacctgactacctggcctaccccaattggaataaagtaatggtagccgtctgcccctgtggaggaatacagcacacagaagggataaagcaaaagaaaataaatataatcaacatcagatatattatacctgaaaaaaaaaggtaagccagagaaaacccaacacaatcagtgagaaggcgactgaatgagagtaaatacgttcttcattgagcatgatgatgatgatagcattcatctagtgaccacaaaccataactagcctaaggtgaacaagccaatgccatttaaaaggtccatatctggatgatatgcacctaaataccaataaacagtacaccactaacggtgatggattgccacttaaggatatttctaagtactccctccgttccatttaaaatgcatttatagatttctgtgttcaacgtttaaccgttcatcttatttaaaaaaattaaaaaaaataattagtactattcatattttattatctaataacaataaaaaaatattaattataaaaaatcaaataaaatggacggtcagacgatatggaacctattactacacttaatataggacgagagagtagatggttaattaatatcccattgctgctttccccaattgcaatgcttcatccaataggcaatcccaggctttcccagccatcgtttcatggccgatacaactttctatccttctttatgctaaaagccttgcaaagttgcaatcttctagcaactcggccatgattagccaccaccaggaactactttctaaagcagagcaaatttgtgcttaagtagttctgtttactgcatacatataaaaatttaaagaaccaaaaacagaggataaataccactgtaaaagttgtatttgggtgattgcacttgattcgagcaaaaatgaagacgcataagtgctcaatcatcttgagcaattttgtttatattaataactggataaacaatcgcaataagcatcttaagcaacatacgattttttttatctacttattttcttgagaagctagctcttattttttaagaattacatattcggggacatgtagccagatggtttgtcgactgggcagctgggggaaatgcccagtcaagttgccgacccactggcaagaaaatggactgaacattttgctaagattcagacagggaaaaaaaacatatactggttcattaccatgatcttacacaaaatctgaaccagcttatcttcattacaaacttttttttaacgactcgcacgagacagtgcgaagttctattgatagagcagaaaaaaaattataagattacaaccctgagaggtcgtaaccaagataaaggaaaaaaaaattataccacccacacaccgacagcgccaacacacataatcgcgagaaggctaataccggaccgaccgccgctagacgaacaacggaacacaaacgggaacgcccaaaaaaacgcccttacaaccaacacaaagcccaactctatctagagcgtgattgccctaatcgttcgagtggtttcggtaaggggatgcctgaacgacgtctccaaggagagaagtagcggaaaactgctgccgccgtccgtcaggggctcaaaagtgccaagactggactttcaccaggcaaccacccttgagggatgagatggcacgacaacgccctcgggagggggaatgaaccatcgttgtcggtccggccaaagccgggctgggttttcaccggctgctcatcacttgcgagtccacggctgacacatcgatgctccaccatcgctcaacctctgccgacatgtgggaccactgcaccgacaccccctgccagccagccttcgtgtgccgaagaccgcgccacacccactggcagctcctcctcgcaccgtggtcgccacctttaccgtcggccgcgcctcatcacgccacgccggcctcctccaccaccggacgcgcctctcgcgccagtccggcctccctccatcggttgcgcctctcgcgccaagccggcctcctcgccactgaccacgcctctcgcgccttgccggccactactgccatcggctgtgcctctctgcgccaagccggcctccgacccctccaatcgctgccgtgcagccaggtgcggccgtctgccacgccctcggctagccgtctgagaccgccatgcctcctccaatcacaatcacggtcaccatcaccgcagccgctgctgaccgcagtcacggccagccacctcgccgccatccagccgctgtcgcaacagtcgccacaagctccacgccgatgtcttacgccgcctggccgccagctagccacagccaccgcgcctgccggccaattgccggccaggcacagccgcacgccacagtcacaaccgtcgtgcctccgcgcctactgaggtcgcccgcgcctccgcggctaccacggccgcccgctcctccgccgccgtcgcgcctaccgcgcctccaccactatcaccgtcgcccgcgcctttgctgccgacgccgcgcctcgccaccttcgccggcgtcggcatcgcaccaacgccgcgcccgtgtggccatggccctgatccggcggtggcgacgccggatccagccgcgggagtgccagatccatcggtggcggcgccggatccgccgccacaacgtctcgccgctgcgcagccttcccgacggtccgcgccgccccttcgcgtagagacagccgtgccgccggggataggagcctcgccgccgccatcccggcaggccgcgcggtttccggcaacacgcttcggtggcggcaaggtggggaaggggagtgaagtgtgacggcggccgggggctagggttcgccccggttgcccgcgcgaggacgacagggcgctcgtctaccaaaaatactttttacaaacttataactgaccagcagaaatattgagctatatataccagcaaagcaatcatacattcgcacagcacgagagccacagcaaagaaatcgtaacaccacaagttcgcttgctaaaacaccacaccacagtaggaagctgcagcacatcacagctttgaaatcagctcagcctgaatatccttctgcgactaaacatcaggcccaggaggcacatcgatggcaggcgagcagttgaagagtccatcaggctggacaaccaaaccaatatatatagcttccattttcagatgagttgtaaagtcgtaatgttatctgaagcaattaggacaagaatactatcttttcgcagcaaaaaaccatctaagtaatataaagaacaatggagaaagaaacgaaggccaaagtgataccattagcatgaagctgatgcgttccactggcatgacaggccagtcttccagcctagggatatgggtaatcccgaaaacgtacctgtagttgcatatgacatgtttttatttcagatatgccataattaagctagaaaatcagatgaacatggaagatcgacagcaattgttagaaggtgacaacttaccagagaactaagttggtctcctctagggacctatccttttttacccatgttgctaaaccttcgttaatccgtgggttctgattaggaaattctcctccagggaacatctcatcgtttttgaacgatgtaacccaaaggttatgctttaaaaatccagctcttctcaggaatttcgcctcaggcagggccagtggaagacagcttgaaccaggtacgagcttgtaccctgttggttgtccagtacgatttacagtccttgtgttcctaacctgaacaaacatgcgtccagcagtgtcagtcacacagaaagtttgagtttgcacgacgatacaatgtttctcacacaaatccttacaatccaatggcgtgcagatgaagggtcacagtcacgcattgcctgtagttcagatttcaaattttttttcttcagcgtaaaatgcattattatgcacattatttgggcctgcactttcaactttgacgtttacctctaccacctggaatggaaaaggaggcagcagtatcacatcttactatataataatgcaaagaaatggaggacttcatgaaatcgtggactagaataaactaacatacttctcagaaaagtaaaggaagcttagctgtttatacataatatagacgggtaatagtaagacgaaaataaacaaagtacaaaggcatggaacaatatcgtactagaagcagccagtgcaggtggacaagtaagtcggcaatattttgaagtcaaaattacagtaaaatagaagcccacacaacatggttgataagcagcctacctgattgtaggcctcatttggtttgcagtcaaccgccatgtccatacgggcaacaaaaaaatgttggtgaactggtgcatacaaactaggggcaatagtagtaccatatttcctttgctccccgggcatgagagctcctaggctaagaattccagtaagctttacttctgcttctatcttgccatcctgcaaccaacaaaaaaacatatcaggaactagagttcctttcgaaagtataattgtgtctgtagacattccactgaaaaggtgaactactcacctgataaaaatgccaatagaacccgtattcataattagcaatagtgcatacaaatgacacagtaagcctccttgaccgtctaacttcagctaatcctgttctccaatcttgatgtttccagaggatcccatggtcttcttcatggaagcaaacaacattctcaatggtctccacaccaccagtaaaatttgtaaaatgtgcatcaaaatattttataagacccaagcagtcacatccctacagtataacaaacaaaattaagttttttcaaaaacaaacaaaattaagtcaaatcagcatttaggtgcaaccatacgaaaaattctgggcatcagcttttaggtgcaacatgaagcattactaagcctaaagaacacaatttcaattacttttaaagaatatgaaatgagaaattcttggaagacaataaagaaaaataataagcaaatggaagaagttcaagtaaattactcttctgtattaattcaaacaaatcaggttgatttgaaattttatcgtaaggctgcgtttgttctagcatttggattgggattttcagcggcacgagaagcaagacaagccgcaaatgatcaaccgaatattaattattacaaacttaaaaattggatttatttattttttaaaagatacttttttatatacctttttttgaaaaaaagaatatcattaagcagttcgggaaatgtgctcacgtagaacaagaaagttgccggtccaatgcaccttagactcagcctagtatattaactgaggtactacttgacagattaattcttgtttttactatatgcttttaacatctatttttggaataacagttggctgccttaggatataagccactagtagttttccttaggatgtatgccactcctagtttttcttagaatgtaagccactcctagtttcttaggatgtaagccactagcctataccttatggtgtaagccactagcctatatatatgtatccaaccagccatagttgattgagtggagaatagaaattaaactagtcccaaaacctgtattccttttgctaacaattggtatcagagcaaggtttatctgagttccatcgattccccatccaaaatgtctctccactccattcgttccccctctctctcgtcccatgcctcaagcacttccagtggacgaggcagcaggcggtcggcggctgacgctgagggcgacggcgatgcgactgctgctgcgcgggtcgcgcaggaggcgcaagcggctgcgcgggaagcacgcgcggcgtgtgaggaagcggaggcgcggctgcaggcagccacaagggcggcgcgtctcgcggcggcagaagctgaagcagcgcgcaccgcggaggcagccaggcaggctgcagctgctgctgctgttttgcgagctgaggaggaggaggagtggcgtgacctggagcgggcagacgcggcccgcgtgcgacgcgacgcggaccgggatcgacacgcaggtcgacgcgaccgcgacttcagcccccatcgcggaggagcagatctccaccgcggtgaggaggagcggcgcgatccatggcgcgatcctcggatagaccgcgccctggaggcccagcgactccgggagcaggcagcggcgattgaggcacaactggacttcgaccgggagcagggtggacgggacgttggcgcacggagccctcgcaggcagcgcgcctccccttccccggacaggcgccgtggtcgccgtggaccctccggctctcctcccgttgtgcagaccgtcgtcaaggatgttggcggcgcatggcccatgctcaccaagactaactacgtcgagtgggcgatggtgatgaaggtgaaattgcaggcgcgccacatgtgggacgcggtctggtacggcgacgtcgactacggggaagattggcgggcgctggaggcgctccttgcggctgttccgacggagatgcagtcctccattgtgaacaagcggatcgccaaggacgcctgggatgccatcgcttcggcacgcatcggcagcgaccgcgcccgcaggtccacgcttcagaagctgcgtcaggattgggagaacctggccttcaagccgggtgaggacatcgacgacttcgttctccgcttcaactccttgcagcagcggttggcgcagctcgtcgacaccaccatcgacaaggagagagccgtggagaagctccttcgcgtcgtccccgagaagtacacgcagctggctctgtcgatcgagacgctgctggacttcaccgagctcacgatcgaagaggtgacgggtcgcctcaaggccgtcgacaaccgcaagcagctacctccctcagagccgatcaccattggtggcaagcttttcttcaccaaggagcagtggctcgcccgccagcaggagcagaagaagggggaggccacaggctcttcggcttcaggatcgtcgagtagccgcaagcgtcgaccacgcaagtgggagaaggcgcgtagtggcactcttggcggcgccgatggcgagcgcaagggcagccgcgacaacacctgccacaactgcgggaagaccggccactgggccaaggactgccggcaggcgacgcacggcggtcaagcacacgtcgctcaagcgctggagggtgacgaggtggctctgtttttcgtacacagaagcatcgagccgcacttcactcccgcacaggacgctaccacgcccctccaactcgacgagccgcgggcccacgtcttcctcagcaacggatcctgcggcgacaagatcgacggatggtgcctcgacaccggtgccactcaccacatgaccgggcggcgggaattcttctccgagcttgactccagcgttcaaggctccgtcaagtttagggacgcctccgccgtggagatcaagggcgtcggctccatcctcttcaccgccaagaccggcgagcaccggctgctcaccggtgtctactacatccccgcgctgaggaactccaccatcagtttgggacaactggatgagaacggctcgcgcgtggagatagaggacggggtcttgcgggtttgggatcgccatcgtcgccttcttgtcaaggtgaacaggggcgccaactgcctctatgttctccatgtacaggtggcgtagcccgtctgccttgcagacggccgcgacgatgatgcatggcggtggcacgagcgctttgggcacctcaacttcgaggccctgaagcagctcggcaacaaggagatggtgcagggcatgccgcgagtcgagcacgtggagcagttttgcaacacctgcatcctcaccaagcagcggcgactcccctttccccgccaagcaagtttccgcgccaaggagaagctggagctcgtgcacggcgacctctgcggccccgtgactccggccacacctggaggccggcgcttctttctgctgctcgttgacgacgtgtcctgctacatgtgggtggtcctgctcgactccaaggcagcggctgcagacaccatcaagcgccatcaagttgctgcggagaaggaatgcggccgcaagcttcgggtgctacgcaccgacaacggtggcgagttcacggcggctgagttcgcggcgtactgcgctgacgagggatccaacgccacttctccgtgccatacaccccgcagcagaacagcgttgtggagcgccgcaaccagacagtggtggccactgcccgcgccctcctcaagcaaagagggatgccagcaatctactggggggaggcggtgatgactgccgtccatctcctcaaccgctcgcccaccaaggcccttgacggcaagacgccgtacgaggcctggcatgggcgcaagccggtggtgagccacctccgcatctttggctgtctcgccttcgccaaggagctcaaccacatcgggaagctcgacgaccggagctcgccgggagtcttcatcggctatgcggagggcgtcaaggcctaccgcatcctcgaccctgcgacgcagcgcgtccgcatttctcgggacgtcgtgttcgacgaagggcgaggttgggcttgggacaaggcggtggacgacggctcgacttcgacgctcagagacttcgtcgtcgactacgtccactttgggggagccagaggagctagcagctcatcttcaccgagctcatccacctcggcacccggctcgccatcagctccggcgagtcctccaccacctacaccaccagcgactcctccatcaccggctacgccccgctctcctacaccggcgcccacaccaccggtggagttcgccactccgttgtccaacgacgaggatcgtgttgatgcgtaccacgacgacgagcctctgcgctaccgcaccgtggacagcatcttcagtgatcagcctgtccttggactggtgacgcgcgacttcgaggccgagctgcacctagcgcatgaggacggcgagccctgctccttcgcagaggcgaatggagatgtggcatggcgcactgcaatgcagcacgagatgaacgcggtcgagcggaaccggacgtgggtgctgcagatcttcctgccggccaccgcgccatcacccttaagtgggtctacaagctcaagaaggatgaggccggggcagtgatcaagcgcaaggcgcgtctggtggcgcgcggcttcgttcagcaggagggagtcgactttgacgacgccttcgcgcccgttgcgcgaatggagtctgttcgtctcctcctcgcgctggcggcccaggaaggatggcgtgtgcaccacatggatgtcaagaccgccttcctcaacggagacctgaaggaggaggtctacgtccactagccgccgggattcgtcatccccggcaaggagaacaaggttctccgcctgcgcaaggccctctacggcttgcggcaggcgccccgagcttggaacgccaagctggactccactctcaagcaactggggttccagcagagctctcacgaagctattgtctaccggcggggcaaggacaacaatgccctgttggtaggcgtctacgtcaacgacttggtgatcaccggcaccaaggaggctgaggtggaggcgttcaaggaggagatgaaggcgacttttcagatgagcgatttgggccttctctctttctacctggggatcgaggttcaccaggacagctctgacatctcccttcgccagactgcctacgccaagcgcatcgtcgagttgggcgggctcaccggctgcaacccagcctacactcccatggaggaaaggttgaagctgagccgcgacaacacggctgaggaggtcgatgccacgcagtaccggcgtattgtgggcagccttcgctacctcgtccacacgcggccagacttggcatttgctgttggctatgtcagccggttcatgcagcgaccgacgacagagcaccagcaggctgtcaagaggatcctccgttacgtcgagggcaccaccgactacggcttgcactacccgaggtgtcccggtgcgcagcacttcatcgggtacagcgacagcgacctcgccggtgacagcgacacgagcaagagcaccagtggcacgctgttcttcctcggcaagtgcctgatcagctagcagtcggtcaagcaacaagtggtggcagtcagtcaagcaacaagtggtggccctgtccagttgcgaggcggagtacatcactaccacaaccgcctcaactcaagctctctggttggctcggctgctgggtgatctcttgggcagagacgctgaagcagtggagctcagggtggatagcaagtccgctttggccatggcaaagaatcccgtcttccatgagcgcagcaagcacatccgcatcaagtatcatttcattcggagctgcttggaggaggggagcatcaaggccagctacattaacacccaggatcagctcgccgatcttctcaccaagtccctcgggcgggtcaagttccaggagtttcgcgccaggattggaatggttcaaattccccaaaaggcgccacacaagacttagggggagaatgacagattaagtcttgtttttactatatgcttttaacatctatttttggaataatagttggctgccttaggatataagccactagtagttttccttaggatgtaagccactcctagttttccttaggatgtaagccactcctaatttcttaggatgtaagccactagcctataccttatggtgtaagccactagcctatatatatgtatccaaccagccatagttgattgagtggagaatagaaattaaattagccccaaaacctgtgttccttttgctaacactactaacagggaacaacaaaaataacctttttaagagagtgtgcgttctttccaagcccatcttctccagcatcaaatgcattcttccgataatgtggttcatttggatctccataaggaacaaccatctcaacgaaactcagcctgtgagcgataggtcgacgcccacggtttccatcaacatatgcaacagaatgaataactaaaccttctttgggagtaaagccaatacggaagttccactgttcaatagaaataacaggtgagattttttgagtcagttttatctaatagtagctcaagtgctcaacaattgaaacaagaaacagaagataaccagttaaccttctgccattccacaaagtaaccgttaacacgaaaactggggccatcaggttgattgatgataagagtcttcaaatcacttctatcaacaccacctcgtgtttcccctggagtatagtttctcaaatgatctggtggaggaagagggacaaacttcctatcttcaaactctatcacggtattattctgcacatcaatgacgatatggatcccttccacaggtcgcgcataaccattctccatagggctatcactttcagttctacagaagatcagaggtttggcaattcttcgattgggagcatcagcatcactgtaatatcctgcacacctatattcaactagaacaggtcatgtttcaaggttctattgtttcgcaacaagaatcggaggaggacgagaagaaggatgtagggaaatccttttgtttagtcagcatgctagatcaattagtgagtgactggatcgatacaactaaaaaaactgtttacaagtttctttacaaatcaaagacatggagaaagacggtagaagtgcagttggctaaaggaagaattatttggtgagtgaatctttcttttcaatgagggaaggattctacgtcagtaagacaatgacagcaaaccccgaatgttttataaagcgtttattaactacagaaattaaccagaccaagcttaccatggatctaccatgacaagatccatgtcatcaactcctctttttttcattgcttcaatgaaaggggggtgacttttcacagtagcttcacattcagcatattccatggcatcctgtaatacacacaagcactacaagataaatctagtaattgacctaatataagtattcactaagtgcttaactatcaaagtaagcatcaaactaagtttctgtgattccgctgattgttttaggccctgtttctttcagcttgggattattataatctagattattgagttagattactataagctagattgttataatctgtagtagaataagcggttagttgtttctttcatagattattagagcctagattattgggtttgcaagtctaaagagggagtggggtggcatggtgggtaatttttcacccaataatctggaaaagctcacctaaatgagtttatcagattataataagctgggctccagattataataagctacttcaataagttgtctgtttctttcagcttactcccaataatctggattataataatcctaagctgaaagaaacagggccttagtggcaaataccacagcacaccagcaataatttagaaccacatgctcattagaaaataaatttggctacatataatctcattaagtgttaaatagtttgaataaaatggtcaaaatcaagaaaattgtgcccaataaatctatagaaagtggaaatatatcattgcaggctgaacatttggaacaacctctgatgatatgagcttgcctctctaatgtccacccctagtagcagcatgcacttcggagagctctacaatccaaatactagtctcatttgtcattttgttgtagacaacaagcctggccctcctagctggcagcctggttggaatgataggagtatttttggttctgggaagcagtgaaggttggaatggtgggaaaaagtatgcatcagctaatgccacgacagttttttctggttccagaagcacaacttcgacaaaacgcatgctgtctcgaacctataatttcgggagtgacttaattatatatttggaacatgagtacataattttgtatgaaaggtagtagatggacagagacctcaggagttcttccagaagctctgacagttgctacagccacagaaatttcagcagcagatagtgggtctaaggggtggcttttctgtgtcctcgtcatgatccggattcctgaaatgtttctcccgcataacgtcaagtcattgtgatatagcatagctatgtactgatgcttaaattgaacagaaaatattaaactatccaaatacacaaattgtggcaggcaaagggaatatcatagaaaacatttgactctttttttttcttttgcaatttaattacagagtaagggacacaaagtttgtatctgtaaaagatagctacacacttacgcagatatttctcaattatgcatgtgcccaccagataaattgcatatggaaccattaaaaggcccttttgattatattgatcaagcatttccattctaaatggcagaatggcatcgttctgttagctaacacaagataatatttcagaccttttatttggtgggggagcatcgattcactcgttcgacaaacacaacgctaagatcaaacacaaaattcctaacacaatgacactctggctcgtagaaactttccaaaaaaaaaaagcacacaaccaaaacaccttaggcaaacattttccctacgctccaatctgatctctcatcgtggtcactcacacctgaagcagttcataaacggaacgccaccgaccaggcgctaacattttccgcagacaagcccaatccagcaaaggggggcacccgaagagagagggagttcaaggagagtgagtacctttagacgaggcgatggcggtggcgggcggcggcaccacagtttcggcctcctcgatcacgccggcggcggcggcgatcgcggcgccgccgcagcacccctccgcggcgcccatcggagagggtccgaaccgcgcgcgcgcgaggcgaggcgagaggcgagcggagaggaggaggggtttggggggtttttgttttgtttggttggtatttcgctcagtctcttattttattactccttccgttttaaaatataattatttttagttttcgatatggttttcgaaatattaatttgatctataatatctataaaagtaaaatattttaaataaaaatagttatagttcgtttaatgataaagatagtaatatcaaatttacatgattaattttttttaagtttttgttgctaatagttaaatttaaaaagtttgacttggcgctatactaaaaatgcttatattttggaacggatggagtattagacaatggtggctgactgagtgttaaattaacgaaaaaaattggttgactggactattcgtcatgtaattaacatgatcacttcatgtgtggctactgttcactcctccggtacgatatccgcgtcatataggccgagtttagtttcaaactttttcttcaaactttcaattttttcatcacatcaaaactttcctacacacacaaactttcaacttttccatcacatcgtttcaatttcaatcaaacttttaattttgacgtgaactaaacacacccggggttaacatgtgaattgaattagggtctcatgttttctagaagaatgttctacaccttctattcatgtatgattgacctatttgagtctaacgcagtgaccaagaaaaacgcaactcaatacacgggacattggtgcataggggaatccacaagtagttgcatttgtacgggagacgtggctgcatatgattggaatgggtgaacattcgattcacaagacctactgcgtgcatgcatgactaaaacaaagcaacgacagcatccaaacccaagaatgtgtggcaaaagaaaaagatgatgatcaaaatagaaaactttttcagagctaatatgtctattaaacacaaatgaagagaatattagatagcaaaactttatcaaatagttactagattattaaacttttccattcctattaaagtctattcaaaatgaataaaaattctgctcataagcttttctacatgaataaaaaatatatttacaaactttctacaggagaaaaatctttatacacaaactttctacaatagttaaagatagtttacctagcaaatctattttataattaaaggaatagaaaaaggaaataactgaaattcggaattaaaaataaggaatattagaagaggagtatagagtccatatagaaatacaattaggaaataactgaaattcggaattaaaaataaggaatattagaagtagagtatagagtctatatagaaacacaattaagaaaaaaatataaattcagaactaaaaaataaggaatattagaagtagagtatagagtccatataggaatttaaaacttactaaaatttagaataaatataataaaattaaaagtagtgtttagagtccgtataaaaatacaatttacaaataactaaaattcaaaattaagaaaaacatgggaataagagtttaaggtcaatataggaatataaatataggaatacaatttagaagtaattgaaattcgaaattaaaaattaaagaatatagaaagatgagtttagagtccacatagaaatacaattagaaataataaaaattcagaaataaaaataaataatattggaagaagagcatagagtctatataaaaatacaatctatagaaaattcggaattttaaaaaaagaaatattaaaagacgagtctagagtccatataggaatatacataatttacaaataactaaaatttgatattaaaaataattaataactaacacgtatataaaatataatttgaaaattcagaaataaaaataaataatattggaagaagagtataaagtctatatagaaatacaatttacagaaaaatcggaagtaaaaaaaaagaaatattaaaagacgagtctagagtccatataggaatatatataatttataaataactaaaatttgatattaaaaagtaattaataactaacacgtatataaagtataatatgaatattacacattagtagttttttaaagttattgcaaaatttaaaattatgttgtcattttaatatatttgaacaatataatgagaaaacatatatgctattatatgagagaaaatataatgatgctagccgcgcaatctgcgcgggccaccatactagtttctatgaaagtaaacgacttttcaccatataaaatctaaattgtataactttatgttaataaactttcatcacgaataaaaactttatattcaaaaactttgtacaagaataaaatgatacttgaattttcaaaaatatcttaaaactaattcttgaattaaataataaaaaagtatatgtattcttgtcttaaggtgatccaaactagtaattgagccaactcagccaaacaagctacgacacataaacgtgtaggctctcaactcctgacaagatatgttgcacgtaaaatgttaggatagtcggaaaagcaaatacggttgtaacgaaaagagaaaggatgtcatatacgcgcggtaagcttgtgtgcgtttgttcgcataacaatcttctcagtcttagctagctagtttgaggtaaaattgacggtttccatgtaaatctacggtacaatgttgccctgcttttgtcatcatggttgctgtaacacgtaatgagtcacagaatttctaacctaatactcccttcgttccaaaatataagaacctagagtagtcttcattctgagtttcattctgagttgtattcattcgaagtagtcttctaccctactgtaaaagcataccccctcgcatagaccgcgacacagttgccaatccacatgtttaattactataattactaatataaaacctaaatgaaatgtataatacatatttgagtaaatttcataaaacctcacatattatggttcaagctacacaaaccacatggattttgatatgtgacatataaccccagatattatgatcctaaagttttacaaaaccatactattgatcattgatcattttgattttgatctactatacttttgagttctacaatcacatctcaaatttataaatattttatccatcatataaatattactttttttgaaattttcaaataggaatatatcaaaatagttaacgatgtagttttgtgaagctttagtacaaaatacctgggtttatatgccacatgtcaaaatccctgtgattttgtgtaacttggaccataataataggtggaatttatgaaatttactctacatattttgaactattttaagacaactctaaccatatcactttcaaatattcagttgaaatattcaaagagaacttaagtgtcaaagtttaataacgttaattacacacatttcgaaacaccactttctgaccagaggaaatagttatttagagaaggctttgttactttctaaggcaaattacatgacgtctagttaagtatacatgatgtacaaagattacacatacaacggccgtttaaacattggtgaaatcgcttgattggatgagccacacaaacaattcacaatgtccgggtactttgcttttccaaatcagccggccataggaaggatcaatgtctgcaaaggaaaggacaattgagtgatttgagtccgagtgtaggacttggaatggtcggctacacaaggcccaggtgatagagttgcgagcacaggctgatcccaagggcctcaggcccatgaaatgaccaccacagtccacatacagcgaatactgatctgttttcaaaacgctttcattggctatttgcgttaccttccaaaacaaggagtacctatgcatctttcgaaagatttctatgatcatatcatataaatttttaatctttggattaaaatccaatagacatagtaaaaggcaaaaagcaactaagaaacaccataatagatactaaattaccatatctttaagaaaaagaccaaatccaatataaatttcaaaacttacatgcgaagattcaaaaattacactgtaagtttcataaattacactataatttacaagaaaatacactgtaaatttgagtgagaaaatcgagtgagagataaagaaaaaatctttcaagtgagatatagcaaaatcgcagaacaattcgagtccaagattattattcattaaatggacttcactgagtcatttcttgtgaagggatttcactatgttattttgatcataaatctagagttaccacttttactccccataatttgattagactttcaaggaaatattgtacgtcaaaatttgatatctcaaaatcaaaccgataaataaacatggtttgcttaaaatataacaccacatttttcacgtaatttcaatcatttttttcctatgttattgcgctctctcccctatatatataagtatgcttctatctctcctgtttgcggccgtcgaacttgcaaatggctcagtggtgccctgcaatttggtcgagttacaaatctccatttggagctacaagtatactactactcagtatctttgtttttaagttatcgtacaaattcagaagcaacaccaaactgaaatcacaggaagattcttatacctaactacagattcgaaagtgaagtcggcaaaaggagaatcagccataagaaatcttgaaactgtgcacgctttaaagacacaatacttcatccacaacacacgacttgcagggaaaaaaaaaatgtcgacctgagccctggccaactcgatgagcagaaaatgtgtctagtgcggtgtctgctaaatgataaattgtggccaatctctagtgatcgtagaagacaagatcaagtattccatacctgataaattgtggccaatctctagtgatcgtagaagacaagatcaagtattccatacctgatacagggacaaagacgctgattattcttctcttcagcatccggcctggagcacacaagttgattttctgttctgtggtccttggccagcagcgctccaatcgctactgccaaacgggaaccaccggtccatctcaccaacaaaaagaaacacgaagcaaacgcataagcatgcttacaatcttattcttggaccacagctgcgttcacttgttaaacatttattagtcgaacaagaggaaatatgcataccctgatacccatgagaagccagaccagtgttgacttcctctgcaattaaatagatttctgagcatggaaaatcttgattactaacaccgactgtatatctgaagagtcaccgtttgtgtgtcataagaacagtacgtttttctgtcataagaacagtacatataacatgagaacttcacatgtaactgtattagtttcatttatctgcacagtagatggcatcagctttagaaccacagacgcaagtatcttcagaagccttccatattaaactgatgcaagatgttaatgtcatgctaaatattgcactggagaatcaaaacaacagaaacagacaacagttagatctttaaaaaagacgatggagggaagggtggccctgatggtaacgcagactgaaaacagtcaagtggtcagctgcaaccccaggttatggattaggctggaatcttgctcgtatccccttccaccactcattccaagccaccactcgttcatctcagcccgagctgggccaccacagaaagcaagccctttcctccatccacaaaacaatgctcacttcattccacaaacacctatggccaccgcttctcattcaccttcctcctctcctcccccttaatctcatctttttcttctcggtgcttctctgctcaaacctgtactttgcttctgccactccatgtctcaatcttcccctttcttctccgttgcccgagcacatgctggagcaggagggcgagctgcggctgccgctctcctgctccgtcaccctgttgctcagctgccacctcggattcatggcctgaggtactacccttcagccattgtgtcacctgccaagacactgaactcacacctgagccttccccatgccacaatatcctcctttgccaatgctgataatggctccagcgggcaagcagatgccacagagtctgaggaggagcagaacggggaatctgaactgtcggagatggccaaggcattccatatatcgccccggatggcaatgtcaatctcagtggtgattgcatttgcagcgctcactgtgccactggcgatgcagtcagtggtcttccatgggacgaacaaaatgaaggcactggcatatctgacactgctttcagggttctacatggcatggaacattggggcaaatgatgtggccaatgccatggggacgtcagtagggtctggtgctttgacactccggcaagcagtgcttactgcggcggtgctagagttctctggtgcattccttatgggcacccatgtcaccagcaccatgcagaagggcatcctagtcgcatctgtcttccaaggaaaggactctctgctcttcgctggattgttgtcatccctcgctgctgctggaacatggttgcaggtaatattccaattagatcaccttatcagttaccgcccttttgagctttgctggaatggtgacgatcagaggatgcaatcatgtagtgccattagcagtacataattactgagacttctgcaagtttcagtatatgaaacaaaatatttaagacattccatcagcgacacattcatgatgcaagaatagcatgatctacctagcaaggcaaaatcaatagacctttgcacttgaagatgctaggttaagccccagaaataaatgatagcagtaagttgtagcagctttattatattcagtgaaacctactgcatgagaaccttctatgagttgattgtactatattacacaatttcctttgaggtataaactccacaatacggtaaacaacttccatggtaggaagtgaaaactgaaaagggaaaggaacttaacagcatagctttaaacttgttgaagtcttttaacgtaaggattttaatccaattatatgcagtttcaggatgttgtgtaacatccatccgtgaatgttgtgcagctcacttgcaattaccagagtttgatgtctatcttatcaacaatcccaactagcagaagtacagaagcaacaaaatgagacaattaaagacaatgctcactagaaatatagcaacttttacaagggatagactaatggaatcttgaatcattagacaactaggcatgcacaattttgatgaagacatttttggtgggactctaattgcgggagaatgtttcatctgcttaatcattggaattaagatattttcatgattgcgggaaaatttaaatgcatacatcatgcctcaaagaaatatttaacataaaattaaatgcctctgccaaagatccaattgtgtgctcccttttacggttatctgagcatagcatattaacatttctcagagtcaatatgaattaacgcttgctatttctaggttgcttcctcctacggctggcctgtttcaactacacattgtattgtcggggccatggttggttttgggatagtatttggaggcgtaaatgcagtgttctggagctccttggcaagagtatcttcatcatgggtcatttcaccattgatgggtgctgcagtctcatttattgtttacaagggtatacgaagggtaagcactagactaactttacttgcagcatgctagacagcatttttaatttaagagttacttagttaggcagtcaccttattgaacacacatcataaatagaggacataggactgttcaagacaagacaataagttaattctctgcttaccctatttcatttcagttcgtatatagtgcaccaaatccaggtcaggctgcagctgctgctgcaccaattgcagtttttactggtgttactgcaatatcatttgccgcttttcctctcagcaagactttttcaatcgctatcctgcaagcattagcatgtggcgcaataggagccgtaatcgttaacagagtgatccaaaaacagcttggtgacctactgtcctcagaagcagaaaagatagcatctgctgataaggcaaatgctcagcaagttggatttctttcggacatagctggaccaacaggagctcaattgcagattgtatatggtgtatttggatacatgcaggtcttgtcagcatgcttcatgtcatttgctcatggaggcaatgatgtctccaatgccataggccccctggcggcagctttgtccattcttcaaggtgtagcaagcagtgctgagatagtcatacctactgaagtccttgcttggggaggttttggaattgttgcagggcttacaatgtggggttacagggtcatagcaacaattggcaagaaaatcaccgaactaacaccaactagaggttttgcagcagagtttgcagcagcttctgtagtattgtttgcatcaaaacttggattgccaatatctgctacacatacacttgttggtgcagtgatgggagtgggatttgcaagagggctcaatagggtcagagcagagacagtgcgtgaaattgtggcctcctggttagtcacaattccagttggtgctgtgttatctatcttctacacattgctcttcacaaagattctggcatactttatgtgagtgattgtgaaatgtaattagtgttttgagaggtgtacagcccattgcacttcataaaaatttccgcaatggcaaagagataggctgactccaaaaagtttcgaccataaaatttttcaggattggccagagtaaataatcatttctttggcaacaaaacacatgattaggtaaaaagcttttacagccagttacaatgttacatactccagcttgttcgtccgtttatctctaatgtactgccttgtatcttttgttttatatcacaaggtggaccataataatttcttgtagagatacaattatacataatagacaacaatggttcttctatccttgcagttatgttacatcaaggacatggttctttaatagccactgaaaattaataatgtttttgtggtatggtgcaagataatagcaagttcactgctagcaagaattcagaaaaatccttttgcattaagaaattaaactaacaaataaataaagcataatttctgaggtgattagtgccaaaaacactcgcacattgcgcaacttgtactaagattcagcaagaaacaaggaactttgtgctttgttgtttaagtagacatatttatcaccgtaaatagaggcatggatcttcagggaaaaaatacagagaaaaggtaatcaacactaaaagtaacaggtttatccatttatgcatgagcaggacagacctatgatcataataatttttccttttaacaggactctaatgtagtgtacagtaccttttttacaaatcatccatgaattcaagcattgattaaagcatcattatgcaacttctatagatacttgatcagctcggtcctcaggttttggatgatccgtaacacaaaaccaccggtttggggggtttgcgttccggatgccccaaaatacaaggttttgtgaaatttactctttgggaaaaaaagagtataaaaaggagagcacttacacaaggctacgggcacttgcacacagttaggaaactaatactagattcttaaattgagacacgcaaatgcaccaacaagctattccgatacatgttattcaagcaataagggaagcattaagatttttccaagaaaaaaactactaggtaaactgaacacatagagatagatcagattggggatagcaagctgtagcacgcacgcaataaatatgggagcagagaagaaagggcaatggcaccagggcaggcggtgcaaacccgaagggaggagtcggagtcgggggccggctcagccggtctcctggtcgaagtcgtctccgtcggactcctcgacgttgtcggcgtcgtcgtcctcggcctcggcgtcgtactcctccttgacgtcgccggttggcttgcctatgatcaccaggttactgttggtcttgcggatctcgttcagctggaagggggggggggagagagagagggcccagacaaaggcaggtgttagcagcgctgcgcgggggggggggggggcgtagcggggaggggggagaagggtggtgaggcgatcggtaccttgtcctcgaggtcggactcggccatggcgaggaggagctcgtcctcctgggtggtggcggggacggggagcagcgtggacgccgggatcagcggcggcgacggccactgccgcatcagcgccgggaactgcagcatctccgccgcgtgccgccgccgcaaccgccgccggggttggggattggggagagtggggtgccctctccgtcgaatcgagtgctcgcttttcgattcgaactcgctgggaaacgcgccgcgccgccgcgacgtcgtggggttccatttctacccgcttcctccccctcctcctcctccgcaccgtctccgtgggccggggatcagcgggccggcccaaggttagcccaccagagctaacagtgaaaattggaacaagtctattttatgcctccctcatatgtcggtcctgatcgaatcgcctagaatcaggtataacgagcctgttcattttgatgtcaaaaaaaaaaaccctactaaattttggtaacttaccaaaatttttgcagaatttcttatatagttaccaaaatttgggagcaaactaaatatagtcacttttttttacaactttactaaaaattggtaaggttgaaaatggcatcaaagtgaataggcccaatgtcttccgtatctccgaaaattggtgccaatcaactttttgatggtttaaaaggtgattttttgctgacgtaatagtatgaccacgattgactagctgagtcagcgggtgagtcccatatatgttatcctaatctcatattctttctcatctctctctcgctaagtggtggtgggagctcgccaaggccccctttgcgacgtggattcctttgctgccaccactatccaggtgaggacggaggcctcgatctatgacaccgtagccaaggaggactacgccacactcgtcacccgctgccgcaagaagcctcggcctgcgtcgacgacgggaggagaactatacccaccacgccatcccgttcttcgatgacaagggattcaatgacgaggatgacgcccctcacgagtggagagtaaccgcatgagcagtcaaagcatacacagcaacaatatgctgctgcagtgtccctttctgccattgccaccatgatgggcaagcaccaagcagctgctatcctccatattcacatcctcaccgagctcccatcgccgccggaaaggatcctttgacttaactgttgtgcagttgagtcactgacatgtgggccatgaaaaaataggacccacatgtcagtgactcaactgcatgtgcagttaagtcagaggatctgcttccatcgccgccgcctagcgaaagagatggggaaagagacatatggagatgtgaggaataagatgagattaatatgacatgcgggctctacatgctaactcagctagtcagccacgattaacctaccatgttagcaaaaacttttttaagatgaaaaagatgttataccagttttacggttggagacaatttaatcaggaaccaaagatgaaggagtccaaataaaactattccgagagaaattgctccagtctccatgtccatgggccggcccatcctagcagcgcatgaattgttgcctcgcatcgcattcgatcgagaaagaatttttcagagccgcaagagagggggagacgaaggttggagctccccgtgcttgtcgcttcacgttgttttcgcctgttcaagagagtgttttttttttcactgcatccttatccataaacgtcttatccagaaagatagaaacccgtggttaatctcaagttttgtttctacaaacaaatcttaagttttacgatgatctatattatatcacttcatactgtgatgatggtgtagtttttctaactccactttaggctggcagagtaaattgatttaggcattttagttcacctatattagtgctgcatgcgtactgctggactactggagtgcaaaattgccataaattttgccaagtatgcctgatgtttgtcataactcataaatacacctccaacttttattagtaaaaacataatatattgcccggccgtctcttataaaccaatgcatagaaaaaaatcaaatgttatgtgaaaaaaactactactccctttaatcattaatatatactgttgatactgtatgtcgtttgtcaaattgaaactaatgttaagaacgtcatacattaattatcgaagatagtattgcacacatacaggatgtatatcaaaatttaataataagtgggctacgagtaacagcccgtacgcgcacgtgtggtgtgtgtgcatgtgcgtataaggcatgcttaatttatgtacaaacctatttttatacctcgaggaaaaatgggaaaaaaaacacctgtcggccggaagataaaaattccacctataaacccccctcggccgttcccacctctccccttctttttcgccacccgatccggcaacaacaacgtacgtaacctcctctctctctctctctctctctccccttccagccgcgcgcgcgcacgcacgccgccgtcgtgacgtcgccgtcgcggtcgccgccatggatccgacgccgcagtcgcacccgatcctggcgtacgtgctgtcgcggctcccgtcgctgctgccggtgtcgccgtcgctgtccaccccgcgcgcgcgggacatcgagcagccgtccccgcgggcgccgtcgggcgccgcggagttcgacctcgtcagccgcatgccggggctccgccacccgtccgtcctctccgccatgacgcgcgccgtcgccgacgtctcctcggcgcgcgacgcgctccgcctcctcggcccccgccccgaccacgagctcgtcgactccgcccgcgccttcctccgctcccacgccgccgaagaggccgaagaggaggaggaggacgagaaggtggcgaagagccgggaggtggtgcggctggacgaggcgcacgagtcgtacggtggcttgctgcgggaggcggaggagaggctggatcgcgtgtaccggacggcgatgagagggagggacatgcaggtggtggccgcggcgcacggcggtggcggggaggaggaggccggggtggtggacgacgaggtggtgcgggtgctccgggacgcggaggaagggaaggcggtggagcgcctcctcctcgccgaccggcagctccgccacctgcccgagcagctcggccggatccgcggcctcctcgtcctcgacgtctcgcgaaatcagctcaaggtattattaattgctgatttgtttctgtcattttctgtggttatcgatcgccaacctgcaaaacctgcattgcgttgcgcggttgcgttcgcggatcacgagttcacgtcgtttcagatttagaaattagaagaactgttcgtccgatccggggaattcgggtgatagggagatttgttatgttttgcatttctcgggtagtttttcagtccagaaatgcagatcgtataagacattgcagatgtgcatgccccaaaaataatggatgacgggtagaacgcaatgctggttaattaaaattgtcactgaaagcaatccacttatgagttaggtttatgagaattgtttttgcattttttttttaagatcacgcatgtttatttttgatatcatgattattgaacacgaatgaattatgagcatagaggagtcaaatatggtataaaaaagaaatcattttcttccaactacgaaattgcgcaatatgctagtaaaactgaatgtggtgatgtggtccattcaagaatttctggtttacaggctacagtcccacaaagctagaaaacactgtaaagttcagttttattttctttccatctgttagtactagctattttcattgaatttgcagaatgtcccagatgccataggcgggctcgaacacctggaagagcttcgcctcgcttccaacgcgttggtctccctcccggactccataggcctcctcaccagcctcaagatcctcgacgtctcgggcaacaagctgaggtctctccccgacagcatctcaaaatgcaggtagaatcaaccagccaaggccaaagcacgcatcatcatcatcttcttcttctccccaatggcatccagatccagttaaagaaacttcaattctcgctaatggtgatcatcacaaaatgatccaaacgtacaggtcgctggtggagctggacgtgagctacaacgtgctgtcgtacctcccgacggggatcgggcaggagatggcgaggctggagaagctgtgggtgcacctgaacaagctgcggtcgctgccgtcgtcggtgtgcgagatgcggtcgctgcgcctcctggacgcgcacttcaaccagctccgggggctccccgcggggatcgggaggctggcggcgctggagtcgctcaacctcagcagcaacttcagcgacatgcgcgacctcccggcgtcgttcggggacctgctcggcctgcgcgagctcgacctcagcaacaaccagatacacgcgctcccggactgcttcggccgcctccagcgcctcgagcggctccgcctcgaccagaacccgctcgccgtgccccccaaggaggtggtggccggcggcgtcggcgccgtcaaggagtacatggccaggcggtggcgcgacgcccgcgccgaggaggagcgccggggcagcgccgtcgccgagagccccagggtgtcgacgcccaaggagtggctggtgcgcagcgtctcgtcgctgggcagctgggtgtccgacgtcacgaggtacggcgccggccaggacaaggcagcggcggaggaggaggaggacgcctacctccagcagaatctgtgatcggagattacagcatttgcttgctccggtgctttcatccgtatgtacagaagaactactgcagaccgtcgccgcgtcgttcgtttcgcatcagccgtgtgtttgtgtgtgtttaccttcgctgattccttaccatttaccatttttgttgttgttgttttaaccgttttgctgtttaaaacttttaaacccaggttactggaccacagtgcctgtgtgtttgttatatttaccttgctgattcctaacatttttttggaggttttcgtttaaccattttgtgactttgtttgatgaagtgcagtcaatcgagaggccatgaattccgatacggtcaagctcaccatttttgttgttgtttaaccattttcttaagacaccaacgctgctttagttaaataaaagggctctggtattccccaaaaaaaaagaaagggctctcccaaaacgcaaagagagcatagatattcatcacgacagtcaacagcaccagcaaagcaacaaattcttactagtagattggagcaaagccggacaatctcaggtcattcattccaacagcaccaacagggcaaccaatagaacatcgggagaaaaaaagaatgaacgagatcatacaaacatcgattaacatacgcaacatagatcttattaatccatcaagttccagtcacagcagtagataagaggcatagagcagctaagcccatagtaattacacgcagtttacctggcaaggtaaccgctttttaagaggcgcgcacgcgcacttaacacatatctccgcgacaaatataccagtcgcacaacaccacacacagttcataagcaagcaggccctgagactgtagcagcagccccggcggccggcgctagccttacacctcgtcacattatttacgcatatacacacatagttaggttatagatagggatggctcaagagcacacgatcttcactggtctttcttctccctagcgatgaggtccatcacagcccgcttgatgcttcctccgttcttctcgagcatctccttgtttatctcagtgtcctcaaagccctgaaaaggtgaaacaacagctaacttcagaaccttgccaatacattcgtgcctgtgaggctgtgagcactgtccagaatagggcacatgtgatcttaccatttcctgcaactcctccaggagagggtcccattcgctgacgccacagagatcatcgacagactgctccaggttgtacttgttctgcctgagtatctccttgttcagatcgacctgcctaaaacccatttcctcaagttccttcagcagtttctcttctgtgagattgtcaatgccatgatgatcagatgatgatgcaccaacagacgcaggtgcattaccagcaggcacattaacagttggaggcacaggagtcacagcaggttcaggcgcaggctcatcaaagacaggcacaaaagcagcagcagttgaactggagggaacatcaacatcaatgatggggtgaagagatgttgtggaagaaacaatgggcacaggtaatggagcaggctcaggattcttgggctcgtcaatctggtggtgtatcaaatgttcaagtaactccttgtttgtgctattgacatgttggttgaagacttgatccacaggctcaatattgacatcaatcaaattacttgtgtttgtgatattgctttctgggggcaaattcaagtttatagcggcagtcctgttgttactgacaaaagaaggatcctccacctgcagatgcaatcagaatttagatgttaagaaagataggtatgagtgtcaagattctagacctatatggacaaaaggaatggtagagttgacaacctggatgtgaacccaaacacgctgaccaaatttctggccagaaggtgatgctaacctccagtaagatatatacctcccaggccttgcaggtgccacaaaatcaacagcaacatcaatctcctgatcaacaggaaacccgtccactggaatctgcacagaacacaaactcaggtttaatgattttacatattttaaatagcatgcagtctaaactacagtcaaaacagtaaactgaacaggggtcacagtatgcataactacaattagaacagtaaactgaaaagaggtcacagtatgcatagtacctacctctaatggaacataggtctgcagtgcaaactggtcgccaccaacccatataagctgtgtgcccaagggccacatgatagacccattgttatgcatacgccaaatcttagtaaacggagttgaaggtgccatcaatgttccatccaggacagttacatccaaaatgaagcgactttcaagtttctcccgctttgacttcatcgcagcccgtgaatggatcttgcgacactgaaaccaagaaattataggacaaactaattgttaatatattattttgtgtccttaaacctatttatacaaaccagagtacaggatggatgagtttgctaaataatgcatcgacaaacatacacgtgcaagcgtatgcctgtgcactcatgcctacaaattgggtactcaccaatgtagggtctctcagtaatctctggggtaagagtggcttgtcaatcctggtgtactcgacctcattgcccatgcgatgaaagcaggcatcacacaaatcataatcttcttttctgttggcaaagaggcgaagaggagggatgtcaaatactgagataggaaaaagaaactagatagagcaatagctcaattaaaatcttacgttttagacttgtatcgaggcccaacaattggttgcactccacaaccatcacactgaatccatctatggaatgtgcgtgctggtgagttctcaatgttattaccaaggtctccatgcagatggccagaggacaagaggcggccagggtaaggaaaatgtggagaaggtccatagctcattggtgcaggcattggtgggggtggacggctcaggggagcatggggttggaatggatggccagctctgcacaatggaacacgccatctggaatcactattggcttttggatcagcttcagactgccaaatagatgggtaaaatgtcgatccacgtgctggtggctgagaccaatcattcagagatggaattggaggagctggacggaaagcaggagcagcaggaggggtaggtggtgtagcagaggtcataacagattttcccttgctttgagcatcactaattcccttgctggcagatttgtcatcacctgagttcggtaaaaagggggagaacagcaactcctcaatggaagggtataatgatgcctgttgaccttgagaagatttaacacccgatgtagcaggagcctcaactgacagagtcttaagacctctagcaccagatgatttggagttctgcgtgtccaagggttgcgaccccaaacttgtgtctattttgggctcgtcattagttttgggatcaacctgtgtttggggcaaaccagttgaggagctgcaggaaccatcagcatgcccattagatgggttgttgttgcttggtgtaaccagtttaacaaaaggttttattagctcagctaattgtggtgatgcggcttcaagtacttcatgggacagcttcgcaagtgtctcaggaactggctcctggatggacttcatagatatcggcttcaaaacctcatcgataactgatttaatatgagctagtgggtcttcagtggtggtggacctgagaggtatattatctgaatcctgctgtttggcctgaggtgctgcagtgtggctgttgtttaactgaacattaatcctgagggggttcagtttctgatgaatagcagcatcatgcagatcatcatcatcatccagcatgacaatatccccatcctcatcagtgtaagtcagaatgaagtcgacatccgaaccaaacttaaaagcagatgcaatcttggaccggagagcggataagttcaggctgaattgtggtccttgcacatacccaccgaacctcttaagagtttcaccatacttcacctgaaatatgtgaaaagggataatttgagaactgctaacaacaaaatttgaatcaaacaacacaaaacacacgaacaatgaaagacaatgtatgattcttaccatcaagaaattaaattggactagataacacatatccaaactgcattacatatttataggaagtcagttgaaagaatagttgaagatccatagggtccattcagatggtagaggatttagtttaatcacttattttttgtgatgtctactattctaatttgagcctaggatagtaagattgaattattttcatcagttgccatatttccttgatgcaaaaatatatctgttgcaacttgattaagaaagaggaagctagatgaacattaaaatatgaaaataaaaaggagcagtgaaaacaaacccatgctaaggctcaatgactttctgcacttggtctatacaataattcattgtgggggtagttaatttctcagacagactcctatggtattactgggctcctaattgaatagatgggtttagcccttcctttgggcaatgtttctccaggcatcaccggattcaggaaaaaggttctatatgaagtgtacaataacgagggcatcacttgtttcatatatatcattagatagaatgtagataaactgtataaggtaatagtatattaaaaggcaaaatatcctagagaagttttggttattttaccaacagtggaactcaaaatatactcgtgtgtttataaagcaagcatgaactctgaaagcatagacaaactgaagatgttaaatctcggtatctcagctaggacaaaatattggcccgatttcatttcaaataacagtaatatcataatcatcgtacctatcaattagaaaaaggcataacaacagtaaaacctacagagtaaaaacatttccacagttgaacaaagtgcaagtacattctagattatcattgtacatgtgaaagttacacggatttgaagctgaagacaatagtttgcctacaaatggtaagatgtattattacctctcccccatgagctggaggttttagaatttagattagccatatacctcactacctcccctggcccagggaatatttaatcccaagatcatgatcccactagacaaataaattcctatcaccaatcaaacagggaacttcacactagcagataatcgaatgttcaagaagttttgaggtttggaaacattcagaaagtttgcatgtggtcgagtacagtcaagaagtaagcacatgagcatatacaagtgaggccataaaggaaacaaatcacaataaacatactaagcacggttgtacgtgaataattgcatcaaaacaacaagaaatatactcagctcaaacatacgcctaagaaatggtaccagaccactaataattgttaggagtacttattaaggacggctgaattatttttttctgaccaatacccaacacccatcagaatggtaaaagaatagaatacatcttagaaactgaactcatgtaggagtatgatttttgttttgtgcaaaaagatgaaggctcttcttttttttttctttttttgattagtttaacaccaggcaggcgcgcgtcatcaacagtcggaggaatcgacattcatcaaaacgagctgacgattcttaaaaaaagaaaaaaaaatcagaccagggcagacctctaagctaacaaagagtaatcaaactcccctaatttctcacaggccaaaaaaaaactaactagcgtacacaaatcccgcaacaccacacatttcgtcaatcaaaccctacgaaaacgataagtacgcaagccccccacgcttcccccaaacccccaccaggagcgattcccctttccccttccccttccccctccgccatcccctccccctaatcacaaaacaaaaccacagctcaatcctgaaaaatagacgatcatctcaccttgaggacgacgtcccactcgtcgggacgcgacgcgagcccctcgtacatcggcgagctccggccggacatcgcgggggtgcgggcgtgcggcgggagggcggaaacccctcaaaccctcaggacgcggcgtcgatcgatcgcgcggaagagcaacaacaatcccccaacagaagaccaaaccctagatcgatcgaagagagcggagccgaggaggaggggaagagagctgcgtagccgtgagccgcagcggcggaagagagcggtggtgcgagagagagagagagaggaggagaggagagagtggcggtggcgatgcggccgagtccctcctcgatgcccccccttttatcgcgcaaaaccgtttccttcgatgcgaagcctgggcgacaaccagagaagacggttgggccattaagtcggctgggggcccacgtgtcagcggcgcgggccacgctcgcgggggagccgtagagggggctgcgtgtaaaaacccccacaggggtatatgtgaaatttattacgtgtaatgttacgggtgagagtgtaaaaactcgtgcggtcccccatccttttcctcccgtggggcccacggtggggcccacgtgccagtgacgagaactggataagggggctctggaatatcctagagtattttaatcctgccatcttcttttcgcgcaaggccggggagagcacaccgccggagggcggcggcctccgctcctcgcctttggggtcgcacgagggtcgctgacatgtgggcccggtgggatctagtataatcctcgcatcggtatttcgtaggagtattggattgtcggtgaggtgtgccgttttgtttaatgatctgctgctagctcttcttggcgtgtaagttttggccttggcgtttgacgactaggcgaaggaactttggcgtcgccgtcgtcgaagtcgtcgaggatgacgacgaattcgggtgtgttcgccacagcggagcgatatattagcacatgattaattaagtatttactattttttaaaaaaatagatcaatatgattttttaagtaactttcgtatataaatatttttttaaaaaaatactgtttagcagtttgaaaagcatgcgcgaaaaataatgagtgaggggttggtgccgaacacatccgcaccgggtccaggactacgggagtggggactagtctcatagagggacgattggcagacgtacggttgtgttcgggagtgagggttgggtactagaatgcaaaacgaagcagcgtttagcacatgattaattaagtattagctaaaataaatttaaaaaatagattaatatgatttttcaaagtatacgggatcgactaaatgagtacggcaaacgctaacaggtgaagtcgcagatgacaacacgagttcatttaggttgaagttgggggctactgtcatgattatggataaggcatacctcctatcttaggacttatggaatatatgaatacggtataccttcacgtatacgggttgtttccgtatgctctaagaaaattcatcagatattaaggaaaatatccttacgagtcgagagactgacaaagtcctactcggtagggatagggtccttaccatattgtacggggtctgatgtcgatctgatgtttctgagttctacttggagatcaagatgacctacggtacaaaaggcaccccctgggaggggttcaaggcatcgaatctcaccgccaacacacccatcatagtctacgaagccatgtatgagattcgaaggcatcgaatctcatagcacgtgaagccaagtcaccatgaggtctcgtcgaatccatcgactactatcccatcggtatcgccaaattcatttgttcccattgtactttgtggttttttcatatcaatcctatataaactggactagggtatgttcatttcttctataagtagaggataaaattttagatattcgtggcacgcttttcaaactgctaaacggtatgtttcgtgcaaaaactttctatatgaaagttactctaaaatatcatattagttcattttgcatgtttttagtaattaaaactcaattaatcgcacgttattactatctcattttgtgtgaagcatttaatctttatcttcaggagattcaaacaccacctaagactattacttgattaggggcctgaaccggtataattcttgtctttgtgtttgcttgatatcatatcacgtagatactcgtaccaacgaaccctaataccccaatcatccagtctacgggtatcgacaaacatttttatctctgtaataactcattcgtttgctgcctcgattgttatcagaaaatcagatattcttccatcaattcagacttatcaaaccgggccttagttcagcacactcaaacctcacgctctcttgggcctcttacatatagccagaccgaaaaagtacaccgaaggtccctcaacttgttatcgagttacaaaatcgtcccccaaccgtaaaaccagatatccggcgtcccttaactaatcaaaaccggtcataataagcctttcggtggttttgacccgattttatcctacgtggcggctgagtcagcgtgtaacccatgtggggcccacatgtcaggctaccacgccagcctcctctctctcttttcccctcttctctcccttcctcatctctctgtcccttctttgacttagccggtgggaggaggagggtgtcggcgggcggcgacgggcaacgcggcggcggcgatggcatcgatgggcgacgcagcagcggtggagggaggagctgcggacgggcagggggtgggcggcgggaaggggcggcgcgcggactgggcgacgacgctgtcgcgcatgacgtagatggcgtcggagttgtggaggaagtcaagtgtgccgtcccttcctgccgcccgcgcgcgtgccgccccttcctgcagccgcgcgcacaccgctcctccccctgcccgcccgcgcactgctcctcccctcgtcgcccgcgcgctgctcctcgccgccgacgccctcgtcctccagccggctgagtcagagtagggagagagagatgaggaagggagagaagaggggaaaagagacatagagcgaggaggctgacgtggcagccccgacatgtgggtcccacgctgactcaaccaccacataggataaaaccgggtcaaaaaaaacatcaaagaacctattatgaccggttttgatttacgggacgccggatatctggttttgtagttggaggacgattttgtaactcgatgacaagttgatggacgttcggtgtactttttcctagccagacccaagaaagctattgggccgaaatatatacatattcaccctggcccgcttccgtccaccactctctctcgctgcactgtagtcgccgcaacccagaacagcggcacgaaaccccgaactccctcccccctcgcgccgcctccctccccgatggagcctctgcaggaggcggcggcggcggcagccggcggccgcaagcggcgccgccgaggaggcggccggaaccgccgaaagcaccaggcttcgtcctcttcgggggcggcggcgtcggcgtccccgccctcccctcctgcgaagcggcagcgcggggacgacgccgcgcccaagggacggggcagcaagccgaagcccgcgagcctcctcgacaaggtaatcggctctccggagcagaggtttgcgaggcctaggcgtgtattggtaggtaggagcaggagtatatgccgtgccagtagcaggagtcggtggaagtacaaaatgttcggggtggtatcgggaataaattttgactagggttgatgggttatttagtgaatctggatgatctctcagtgtgggtgaagtcaaagcatagggtgcctcctctgttattctttagtagcgacagtagaagtgccaaacctcagtaattcagtagtgcttcgtatgctcttatgcatggttgaatgtgatacattgctctgaatttgcacagtattcacattttctttaggcaacacagtattcacgttaggcttttatttgctgctccttaataatttaataacttttgcttaaaaaacaaaattaatgaactagcctgcagtttggagataactcatgacttattatatgaatgttttacttattttaccttctgtttattctttgaattttttttctctgagctaattagttgatatgttttttttatgatgtgcactctagatgcgtgcaaggttatctggtggtcatttcagaatgttaaatgagaaactatacacttgcaggttcgaattcttctccagataacactacttttatgctaatgatgtgctgctattattgaatgctttacattatcaatactgtattgaacagtcttcaaccaataatgaagtgtaagaacatgacgatactccaaatttcgtatgttgaaatatccacacagtttgtagcttacattttgtacaaaatactgctatctttaatcatgctaagagatagtgacatgcatcaatcttaaccttcatgctttgtctgacccggtactgttaattattggtcatatcaaccggtatgcctgaaaaacatggattgccctctcacgtatgactcagaatattctaaattggagttcctaatgtggcttcgactttacccttggaaactggaaatgtagaaatcactaatcagagcttcatttttgcaatattcacacttttactcaaacattgtttttttttcttttcagtggacaagatgcatttgactacttcacaaatgagcctgatctttttgatgtggtatgctatgcacttttcatccattttggtaatcttattgtttgctagatgaattttatctttgaagagtatgggcaacaaattttgaactctgggtggtgactttttcatatcttacctcatcaactcttcagtcagtgccttattgtttgtacctctacagttctatctacacaaacctcatgctgttagttgtttctttcttatttgaataattatttttgtgtattttgtgggaggaaaatgtattgcagcgatcgatatgcagggactttttgcattgcagcaataattgcccctatggttcataccacctgatatatggctgagatttcactttgttttcttttagtatcatgcaggatatcgagagcaaatgtcgcattggccagagcaaccagtaaatgttataatcaattggttgaagagtcatagtgcatcttggacagttgcagattttggctgtggtaagaatgctaaacatttactctcaatatgccgacaccttttcacaatgttttcctttttatttccctggcataatcatggtaatacaattgacatcttgtctaggcaatgcagcagtttctaaaaatgtgaagaacaaggttttctccatcgatcttgtttcagaggacccttcagtcattgcctgtgatatggctcatgtaagcatttaaccatatcttgtatggttgtacctctttggtgctttaacgtgttggcatgttgtttatgtgtgttagcataaatgaacaaagtgtttcttggttcatttccagtttagcttcaggggaaattctggcaattccttgtcagccatgtatgctctttttccatgattcttactaagcttcacaactacactatgtgtcattacaaaatgacccaactttaatcctccaaatattggttatattcttgtgcaccttgatttcttagtgtgggttccacaatttatctttcatgattccaagtcattacatggtcaatactcttttagcattgaatttttctgatgttaacatgttgttcctgtgttaaaaatagaagccattatggtcgatactcaaatactcagtacactcatgcatgaattacaagtaatgtaagtatgtgtatgagggccaaaggtaaaagcagctggccagttgctattcttacaatggaggtgcattatcaaccaaaaacaatttctgataattctttaatatgtcacaagaaggaaataaatcactagctttgggccattttaaacatagctcttgggacattctaaacatttttcatgatttccattatgtgcaacatatgtaaaacaactatacgaaataaacactaaaatatctgttttttttaattgagttgttacttaaactaaaggctttgttatttctgtagactccattggagtcatcctctgtagatgtggcaattttttgtctgtctttaatgggaacaaactatccgagttatatagaggaagcaaaccgagttctcaaaccaaggtttgcccctaatgattagctgctacacttctatgacaaagtatgtgcttccttttttactattgatacatttgtttatgcagtggttggcttcttattgctgaagtgaggagtaggctagacccaaacactgcaggtgctgatcctgataaattttgtgaggccatcagcaagcttgggttttcccttgtttcgaaggtatacttacggtttcttctacctttttctcaagtggactttggggctgtttggtttgttgccgtttgtaaccataccagctttagcggtgccaaaatcagttaagatagaggtatatatggtgtgtttggtttgatgccttgcctaaacttttgacatgatgttgagttaggaagtttctagaattaccaaattttggtatggaggatatatgaggtaatatttggtttcccaaagccaaaatttattatggccgaaaatggtaacaaaccaaacaacctcttagttacaatgagttaattttatatagtgaagtcctagaaggaatgaaggattataacataatatggcgatgtttactgatgtccaaaccaaaggctaaactcctgaagcgcatatgtgaaaaaggacatatcatctattagcgaactgatggaataacgacttgtatatctcaagaaaaaaaatctctgacttcttggatgttgggctgaaaattagcttgataggattgggtgattattatatttatcccatttcataattgaccatttaatatggtcagaaactgaggccattctggtccactggtttgtgctgatatatttgttactatttaatctatactatcgctcgatgatatatttattactatttaatttattactatctctgggcatcactaaatgttcaaagccatgatgatgttgcttttagtgcagtagttaccgaacaataggtcatattttcaaacatcgcatccttaccatgtacttcagaaactaatatgttctttgtgcccattctctctttgtggtgatggtatctgaaatgtttcctttgatgtacccacatgacggattcccattttgtgtatccttttcatgtgtggtacttattttgtgatatgaaaattgttctgtattgacacaagactgttctgtgcgaaaagagaacagtgtcatcatgtttcctaaattggcaattggttcctttctgtaggatgcgaaaaacaaaatgttcattctgttccatttccggaaaaaggtcagttatgccactgccgtaccttaattgcacttgaaaattactctatactttgatcattgagagattattgttcagctatagtctggcattgaatgctgtggtttcacgtctttgcaggaaaagagtaaggtggtcaaaaacatcgattggcctcagttgaaaccttgcttgtacaaacggcgatgatctcatccattgataactgtaattgtactagacctcttccaaggttctcttaaattaagttgttgatgtactctatgttcccttatctcaggcttatctgtttccgttactttctctttttgttgtcgcgtgattttctttatgcaattatgcgttggacctcaccagacaaaggcctagtcatctagtggcctgtcgaatgaggtatgctcacagggcagagtataattctgaatctgatgcatatcctgcgtgagccttgtactcaaactaaactagcaagtaagattagcaacttacgaatgcaccaatgtgccattttgttgctagtaactgtaacctgtaaatctcctagcttaacaacgtggttgtctacattgcttctggacatttttcttcctgcctttttgacttgtagaacgcaggcttggatcggtattaacgagtgaccatcgctaccgccatggattacgaccgcgaccgatttgcctgactgcctgccactttctggtagaaattttgttccttttcctgggtgggtcaaagtcgtctttacgtctccgactctccgtgcgtgtggttgcgttgcgcatgttgttttcagttgcagacttccagtagcatctccgtgagtgtgggggcgaaatttgattcgattagactttggcgtgccatgcttaaatcgtaagcaaaaggtatcattttgacaattatttggagagatttggtcatatcctctccctagattgaaaattgaggatttatactcctatagcgctgacacgtgagatcatctaagattacaggcatgtgggacaagaggataaatccttaaaatttagggtttgaacgaatgaattaactagttataagtagttaaaaaattgctttagaaaactatttttaaaaaatcatatagaaatatttttgtactacctttgttctaaaaataagtttatttttcacacatcccacacatactaattaaaaaaaagagagactacaatgcttttattttattaaatcataatgcaactatttctcactttatcatcttccaatacaattattccatactttcacaatttctgatgtaatgattactttaaaaaatgaacgtatttttgggataaaaggaaggagctagagatgaacttaatatgggatggagaaagtatgaaatacactatttgaaagctttaaaaacatacaaacgaaaatccaaaatcagagtcaatagggccggagggcacatgatcagatttcatagctcttgccactgtacttgcattccttttccgaaaagaacaaaaaaaaaaacaccattggggcacacgtggcacgcgttagagcatcgaggcccacagccccacactagagaagctgccccttctccaacccgcagcgaccagagagacagctagatcgatgttgcaaattttgcaatcgaaacgatgccctggtttttgacataagtttattttaagtgcaggcttcttctccagcccagaactggcattacaaaattcggagcagataaaatacacatatgaaccccacgggtgacaccctaatccccaagatccgattgtttaataaccaaactaatcatgctgcacagtgattagtccctcctaatggagcatcagagcttagttcgatctgacaagtgccccctgtcgacagaggcgagaaagcatcatcatcatcatcatcattatcatcacaatcatcataccaagtgtacttacactagtactggtgtaccactagcatatactactaataatttaagttctttttaaccaggtgattagccaagataaaccgtgtactaataatgcaataatttacaggacacggagctctcggcctcaggctgcttcgtgccaccttctggcttcatgtgccagtctatctgcatctccatccatgtctatcgctggtgcagagagaaggtcacaactcacacgcgcaacgcctgcctacgccctcattggccggacgcctgggctccagacatggacaaatttggttagcctgtggggtccctgtgaccctaataaacatcggaccaagcatcattagatcagttttaggcccctttgaatcgcaaaattgagaaaacgtacgaataagaaaaacgtaggattttgatagaattgtaagtgtaaaacagaggattgcaaaacgcaggaaaaacacaggaatgaccgtttgattgaaccgcaggaaaaacgcagaaattagatgagagagagactcaaaggaaagtaactaagaggttgaagctcttgctaaatttcctccaaaatctctataggattatctatttcataggaatttcaaaggatttgataggattcaatcctttgtttcaaagagcttcataggaaattttcctataggattgaaatcctccaaaattcttatgtttttcctccaattcaaaggggcccttagttggatttttgtttctctttgttggtacattggtcttctttcagatgcaggggtttgcagtgtggttttgcatgaattggtttactttctgtgaaattctcggaaaatttctccgttcagaaggagaaatgtttcgtctacataccgcaatagtagatattaaaggacactagacatcctgtatgtgcgcacacacaaatgacacattctctcttggtttggtttagggcttgtttagttggcaaaattttttggcacggacatatatttaaagtattaaacatagtctaataacaaaaataaattacagattccgccgggaagctgcaagacgaatttattaagcctaattaatctgtcattagtaaatgtttattgtagcaccacattgtcaaatcatgacgcaattaggcttaaaagattcgtctcgcaatttcctggtgaactgtgtaattggtttttttttctacatttaatactcaatgcacgtgtccaaatatataatatgacagcgtgggaaattttgtttgtgggaactaaacaggcccttatatactgccgattactcactgcaaagaatcactactaggagtaccaaattagccaaccttactttaccagcagcactagtagtactgctacattaagaaccatccctaagaaagaatcattttttttagacaaggatgtggtataaaaccattttcatctaggtgatgtaatgtaagatgccaagataaataatttattcgcatgcatcatggccccaatgattatcattttagcgaaaccaatctgacccattccatgccgtgtttgggcggttttacagacttatctttccgtcctttgaatatgtgcagatcttagggcactaaagtaatcattttccacctattgtttctctccacttttaatactcatggagttatatttgttccagcatttctgttttaccccatatctgttaataagaattattctcctttttagtgtagtggataccccagcttccattgaaagctaataatggcacttttaatgagtataatcatatagttttgattattctttttcataataaaagtataattatagtattgtagtttcgatcttactcttactactatctcggcagctatattttgggtttgagtgagtagtatttctgtttttacccccacactttgacctttttacggttacctatatattttaacattttcatgtgcgatttatcagttataagtttagaaaaaagatttttcccttttttaaactttattccattcagaaacagggtacatggtttcttgttagaagagctttcacaaatcacctctctatacctccatggctccatatccacacaccactaaccacagccaccacccagaagaaaattctaggaaagcggcaagcaattttggagacctgacctgtggagtgcactaacaagagttttaagactttgacacttccttaattaactactaactaataaccgatcaaccaattagttactcctccatgcaaacaaaaacactactaatacaacaatagactaagtctctcccctcaaatccccgtgccacccaagctacagctacacaagcagtgtgctactactacacagtggtcagtggttggatcatggttttataaaatcatacgaatatcgcctgcggtaaccttctcaatttttaaaaccacggtatatcttacagtaattatacggttatcatgataaccgtccaaatcatggggtgacggtaaccccattcaaaacgatttgggaaacagccgagctgagtcgaagtccttagggcctgtttactttgatgctatttcaaccatactttttgggtaaagttgtcaaaaaaaatgtcaatgcttagtttgtttttaaatttggtaaatacataaggctctgttcgggagtgagggttgggaaccctcactccccggcacacaaaatgaagcagcgttttagtgcatgattaattaagttttagctatttttttttcaaaaatagattaatatgtttttttaagcaactttcgtatagaaactttttgcaaaaaaaacacacctttagcagtttgaaaagcgtgcgcgcggaaatgaggagttgggaacttatactacaaaacagagcctaagaaatcctgctaaaattatggcaatattaccatcttactaaaattttgacattaccaaaatttggtaaggtttattttagctacaatctgaataggcccttagggcctgtttgggagggcttaagattctgagaagcaactagttggaagccagcttttccagcttctagtttattttctggattctacaactacaatttttcagaatctgaacaaaaaactgtattgtttagggaagcttctgattctaggataaactgcagcagctaaaagcttcaccaaacatgcccctagttgaaagaaggcgaccattaaactgttagtagcacaaatctgccattgccggagtcattagctaatccctcttctctctctcgatcgatctctcagtctcacccatccctccctccctggcttttttacccctcacgggccgcacgctgcctcgctccctccgaccgaccgccacaccaccaccccccacccctcttctctctctctctctctctctctctccacatccccatcgtctctcaccgcgttgctgctgctgctgccgcctcggccaccgcgcgcccgcccgcgcgtcgcacgcagcttcttcctcttcttcttcttccccaccctctccacccgatgcggcggtcggcgccgcgctgctgctgctgatgcgggcggtggtgaagaggcgacgagggggagagcgcgggcgctgctgcggctattggagatccggggcttcgtggtaagcaagctctgctccccacccccgcccgctccctactgattcccgcctgatcccgccgggattccgctagattgctctgccccccgcgcgcgccagcggcgagctcggctttgctgtgctgtgctgcggccgccgccgccgctattggctgcgcgacgcgtgggggagaaatgggcttaggcttttaagcgtgctgtttaggcttttgactgctctgtggctgtgcttatggtagaagccgccgttaaaaggtggctcgattttttgttttttctccctttctttttgtgtcagggatcgtgcggggctaggctgggctcgagcaaggtcacgagtgagttagtacggggatggtgatcttgtcatgatacaatgcggtgtggctgtttcttttttttttttggtgagagtttggtagagagatgacaaatcgtggcttagttttcaaattctttgtgattttgtttcccaatgcggcccccaagtagctcactatgtttgcaaagcacatggaataccattttattgaaccattttgtttttttgttcgtggggcattaggttggaagtttaatgctggatatttatgcacattttgttgctctgatcaaaggttttagttggctctgttgtaagcttaagagggaattagtgatttagtgtggctcatgtaccttgagtagaaatggtcgaatgccatggatcattgtagtatatatatacatctacgccactgtgctatacgcttgtatttttgtacaaattaacttctaattctttaggaatgtgaatttgtccaattcgagggtttcttcttgtttattataaccgtgcatttgtaagtgaccaacgtgtcttcgtgatgtaccagtccaactttcaaatacttccaaaaagtttaattggtgaatacatgtgggttcctcatagtttttacctatgtcaagtatcatgctcagcacttgttcatggtttatttctaccccagttttacgttatagtttatatagaaatgtcacactgtcactttctggaacattcaatcagtattcatgatatatacaacatactttacaatactttctggaagtagaatttgcttgaacacgttagatccttctagtttcctcctacgtccaatgaagtgaggtactttacttgtgtttatgatatacttttctatcgacttgcaaaaactttctaaaagttgagtttcttaataaccttaatgtcttttgatgcgctgtacgcgtgccatatgctatgcttttacaccaacttccaagttttccctaaaagctgttcttctatttaagcgattagtggggtcgtgtgaccccacgggacccaaagtggatccatttcgacggggatggaatctgggagtgagttctatgcgggcgaaggtctccagatcgaccccaagtggctcatcgacccaaagcttctctttgttgggccacggattggcgaaggtgcacatgcaaaggtctacgaggggaagtaagtctcatatttttgcactgtcatctataatttgatgatctgtgtgaaagttttgcttctaaattaatttttgattgatgctgggattggcaggtacaagaaccaaaatgttgccatcaagattgtgcacaagggggacacccctgaggagatggtcaagagggaggggaggttcttgagagaggtgactatgctgtcaagggtgcagcacaagaaccttgtcaaggtcttgatctttttgttgactcttatcatttcttttcttggagtggcagttgtggatgcttttgaatgttgaaaatgtactcgcttgttgttcagtttatcggggcttgccttgagcctgtcatggtggtggtaactgagctactagtggggggctctttgcgcaagtacttggttggccttcggcctaggagcctggagcctcgtgtagctgttggatttgcgttggatattgctcgagccatggaatgtttgcatgcgcacgcgatcattcatcgtgatcttaaacctggtaagattgctatttggaaacctggttgcttcatgggcatttacatggtggatttctgcaatccggaataataactattcattagttcatatacaccatgaggtcagacagttgcaggacttctttttgtgtgtgtgtccttgggtgttgggggcatggtccattcctgtgcataatcaatttcttcagtgggtactcatatgtcatcttgtatcaacttctaataataatttgaatttcacacagctgtttgccaaaaaactaatgttttttttattttaatattacattaaacattctttgtggatttaccccaccagccaaagtcacttgaagattcaagacaaataaaatgttctcattagtaacataggatgagaattgagaatataatctactctggctgtctgacctattatgtaaagttaagcttcatattgcacaagcaatgtgcatttttcaagggcaggaatgagctcttctttttacattcaatcttattaagttatggtgaattggtgatgtttggaagttaagtcaaaaggtagcagtgtcaatggcttgttcctcttttcctgtgtcctgttgtgtctgcatgtgatgctattatgggctagtctatttatgggaactaagcctaaataccacaaatagcactaattgtgggtgtaatggaagacgagtgcaggggagcaggcaatctatattgtttgtgtatgtttgtccaatgaggtaataacctcaatcagcaaatatagtgggggaaggaactgattcaatctgtcataccatttttctcttcattctttattattgcatggactggtctgcaatgatggagatctgtctagatattcatggcgttgattgggaaatttactaattatagaaaaatgtttcaagataataatgattatacagctttctgaggatttcttggttgaccttcgatggaagaaaccaaatttaagtccatcttgtactatgttttcaatgaataataatgtggacgaattagtaatgtggaagattccaagtacgaccggcatatgatccattagaggggcccctggggggcgggcatcttaaaaaggtagcttcagttctgaccttctgatagccaccttccaagggcggttccttttggaaagaggtggttctcccaaatggtttattattgtttttcggtttaagatataatagaatctctaagcatgctaagtttatactgtatagtgtatcaagtagcaaaacattcaggacgggtgtacctagtgcaaaagtgaaccagcaactagaaaaggactgctattatttcctctttcgataaaatgccaggaaatattaatgagctgaacatcggatgccagtggagtactactgattctagttcacgaatcaatgcatagctctgttattcaaaaaacagtactatatttctctactgtaaatttacctaatactatttggtgttttttttcagtattttcttttcagagctatttttttgaaaaaaaatcaagccagaaatatttgtacaaataaggtttatcatgagccattgttttgtccttctgtacgtacagagaacttgctgttgaccgcagaccagagaacagtcaagcttgttgaccttggtttagcaagagaagagacattaacagagatgatgactgcagagacaggaacataccgttggatggctccagaggtttctgttactgcagttcatatttgtcaatataattcttttttgtcaatatttgctaatcctgaaatatatccacagttgtacagcacagtgacattgaggcatggagaaaagaagcattacaatcataaagtagacgtttatagctttgcaattgtgttatgggaactccttcacaatagactgccctttgagggcatgtctaacctgcaagctgcttatgctgctgctttcaaggtataattactgatacttcagtctaatgtgtggaagagtggtttgtcaatgctatttgcttgaataccatattttctcaacatttgcatcgttaggtttagatgtacatatgaagctgccagtgtggcgtttgtaaggctattattcaagtttgacttcaccactcagtctttcccctgggtgggttttgctgtaggctcttgattaattttcatagagctctggtttttttaccatatgtattttttcctgtccatattctggtatagtatatctggtatttgacatgatgcaagcctcattttctgcagaacattagacctagtgcagataatttgcctgaggagctatcagaaatcctaacaacctgctggaaggaagaacccaatgagagaccgaacttcacgcagatcgtacaaatgcttctgcattacctttccaccctttcgccaccagaacctctggctccgcctcggacgttcagttcagagaatgcaatcttgcctcctgaatctcctgggacaagctccctaatggcttctcgaggcgacctcggcgacacaccgaagggcaagatggaagacaagccaagggggttctttttctgcttcagccagtgctattagcacagaacaaaggaaactcccctggaggatgcaaatatgaagagaacattacctcctgatgcacagcggctcggatcacggcccggcggcgagtcccggtgcccatagcccatacccaaagaatggcagaagttcttgtagaactgttgtttctgctagtcagtccacccctctcttcttctgacatgtttaacataccggcaggataaatcgagtaagcttttgactcctgctatcagtgatgaaaatagttctgtcgtatattttcggtggacaagttattcaatgtctaaactgcgcccgctcatcgtatagtaataatccgcattcatcagttttctcctgtgctggaaatcaagggggtgctatacttctataggctctgttccttctctgtatctttcccttgttctcttgcttgcaatgttgatagtttggtgctgagtctgtatcgggggcaaagttcaggccgaggatgctcggcaggaataacagtccatggtcatcagaaccataatcccctctaatataactgcacaagtaagttttagacttactccacatgcatagaacagttcaagactaacttttgatacccttcatttttactgcattcaaaagtagtcatttatttatttacgggaggggtaaaagaaagatgaaaaagaatatgtccggaagttgtacaacgatttgtatttattaggaaacaatcgagaagttcaaaacaattcacgcttataacaagagcggtaaataacgaattgaatgtttaagaataccagatgaaaccccactcccgcgggggttttatatgttattagtaaaaataacacgtaaaattgacacactttgtataatttttatctctgatcaactattgagaaaaaggctatatgctatatataaaccatttgatgtggtttataacaatttaaatacatatgaattgatcgtataaaagaaaaactaagatgatgtgagtcaatgagagaaggaaaagaaataacataatagtataaatcaatcatttaaaaacaaaactaaggtgatataactttataagagaagaaaaaagagtgatataatttggacgtagatcaaccgtccaatagttagaaatagttaagataatgtggcttaattagagaaaagagaaataacattattatacttattgaaataaactttatagatatataggataagcgtgttttcatctactttcttaccttaatcaattataccatcccttatttaacttaatctctttagagaaaggaaagtaaatttcatttgatcaagctactccctcctttcaaaagtctaagtcctatttctttttcaccaagatcaagatgtagttaactcgttcatcatgtgacaaaactaataaacatgcaaccaataactactaaaatgacttattgggtttcgatcaaaaatttaatatagcacataatgactacaaataggacttagacttttgaaaaaaatcaaagaatgaaatagtacttagacttttggaatgagagagtattacaaaactagtatatacttaaatatatgtatcataaaacatatttaatatcatttttttatgaaactacatattcaaggtatggtataaaatactacagatttcataaaactacaactttcataatctcaatagtgctatagatataaactttaaaatatgtagtttttttataatttcatcgcttaatctgtagttttgtgatacaatatcttttaaatttgtagttttacgatatatatgatgttaaatatatagtttctatctatagtttagtgataatttaattaaagtaattatggttttatgatatttacttacagaaatgaacttcatatgttcatggagttgacgtgcagcagttgacgtgcgtgaagaaccggcagcggcgagccggcgaacgaatgaaagcggggacaggatggacgtggagccgtcaactccgcacagcagcgagctgcagcctgcactgtagtactcactccgtactaaaaaaattaatttctagctatgaaacatatgcttgtccatattcataagaattggttcttttttagacgaagggagtattacgctaactcgtcaagattctcgggctcccttgttgaaatgttgagttgttggaatgttgagcctctgttgaaacgttgagttgttgccttgttggtaggtgcctccctttggtcaccaacaaaacaaaattcatgctcgctcgtgcgcgttgcgtgctgctgctagcctcgctgctggcctgccgctggttgctccatcggactgattgattattggatgggattgcctctcatgtttctcacttgggcattgccgttcatccttttgtcacaacgagtgttgctgtcgttgctgctatagcccgtcatgtcatactaatgtttttttacaggaaagcaggcaggggaatagaactgtgtctgatgtcttggccccattgctatagtaggacatgtactgtggagtactggcaaatcgtccactgctactattggggtctttgggagcggcgaattctccactgcatgtacagctagcagagtcatcgagaacaattttatcggtattactggtagtaaaaacaaccggagccattagaattctattgccagtagaaacaattgtattcagtatactcctacataatacttccagtagttacaatggtaacatataattagatatggtacatcgattgaggaaaaaaaatggaggtttcggatttattcaactattgtaaaatttgtcactcgatgcttaagagcaaatttaactgtttttggctgccataatagagatttaagagcggctcgctgccaggcctagccaatcatgccaagcagtgtgcactataagagtccttggataaaaaatatatataggaattttatataatttaaattctatagaaaactcctatttaatcatttaataaaaaagattggatattttcaaatcctataaaattcttgtgaaatggctcacttaatatagattttagatgaaacttagtaagagcttcaacttcttaaaaaaattattgaagtctatctttttcatcgaattcatacggtctaatcaaatactccgtagatatttacgtgttttgcaattctatattttagacttacttgattcaaaggaaatttatagaaattttagaggattttattcctataggaatttttcctacaaagccctttgaatcaaaggaatgaaccctatggaatcctatgaaattcctatgaaatgcctcttcctatataagttttggaggaattttaataagaggtagaacctcatagaaaaaatcctttgagtctttatctctcctcaaattcctgtgtttttcctgtgatccaatcaaacagtcattcatacgtttttctgtattttgcaatcatctgttttacacttacattcctgtcaaaatcatatgtttttcctattcctccgttttttcattcctgtgattcaaaggggccctaagggctcatttgaatcgcaggattgagaaaacgtaggaataggaaaaacatatgattttgatatgaattgtggggatacccggtttgagtatggtatcccgaaaccacccgcgaccgtccaggatttcgatcgcacacagattgatatacagaacagctttcgatacatatacccaagtttttacagaaattattacataaaagataactaagacaggttttaggggccgacaggccaaacacactccctacaaacaaaagactcaaacacaaaataggataaaaacaccacaggcaacgcctgagagcagatcaacctagaacaaaaactcgacagcaccatagaattcttccccttcctgcgcctcctcagggaagaactgatcgtctgaaccacattttatgcaagaggtgagtaacgaggtacccaacaagccacatccataataatacaaatagaatatatgcaaggcgtacaaagaatatagttcatcaaggaggttccataacaagcctattataaatagtttttccctactttatcaaacattttattcgcaaacaattataaatcatcattttaaaatggtagcaatattaatcaccattcatcctcatcttcgtcatattccatattttaatttaaaatctactcataccatgataaataggaatcacccaatgacatagcttcttaaccggaagcacggcacattcgaatgatttaagactcatctctgtagagactgcccagctttacccacctgatgtcaacagctagctaggctgaggacaacatagccgtttgagaatcccacttactactagttactgcccagtgggatattgatccgtcctagcagtcgggcacttgctaggcctaagcaaggctagacggtcgctgctttcacgggttccaccgttgtggatcatgtcaacctggccaaagccccttccacatgtccaccccaaacctgctcatagagccaccctacagtctttcatatagtgggacaatgtactaggctaagtctgattactcagtcctatggataggcgcaaattacatcattttccatggcataagggggtagtccttatatccgggaaagccaccaaaactagcacaggcccgtgcatacttcaagtgtaaatatacactttccacaaaataattataacaatatgcacggcctcacacaccacaacatccatcttcacccggaattaatcttccatatcactccaggcgagtgactcatatcaaataacacattttatatcacccgacacgccaccacgtgacgacgggtaaaccatgtatatgagtatagatatttggtagtcttatccactagaatattattgtgaagtatataaatctacacctaggttatcaaaggacgtgatatagcaattcatggatttggccaataataacaatgtaataatgggtaataactaaactaacaagtttattcaaaaataattcatatgcaaaataattttataaatactcaatgcagaaaataactaagtggttctctacaaggtttcaatatgatcaaagattggaactatggcttgcctcgtgaaatgtggccttcgggagcttcaacgtagccttctaggtccacttcagttcctgcgagtccggtgggatcttcaacgcgatctagcgtatgcacacgaagaaacgaccaaataagcctataacaaaaatactacaaataaacgataaaataaatattgtgaatcagagcccgaacaaaagaaaatgttaaatcgagagttaatttgagttggatgaaaaaaagatttatcctagggttatgattcatggcatgtgtagtagtggttgcactttgggattattgttgttacagatactagaattgatttggtttgaatctgggggtgaactgatggaagaattgatatgaatcggttttcttttggttgacaactacctaggttggctcaggtggtgtggtcaggctggaccatggtggaacagtattgaatctagtactgttcttcttcctctgtgaaccacgaacacagagagagagagagataaaaagagaaaagttggatgacggttattgtggcggaacagtaagaacgtcttgaggtaatttcgtccccaggtgctacgaactcgaagctgttgctggttctctgagaggatgttcatgctggccggaacgcgaactataggattccagccgctagaggagagagaagattgggtggcgagctccggtggcgaacgtggcctggtgagcgcgtcaaaacgcgttcccggatgagaaggttccatttttgtggttagttgatagagatgaagcgccggaaaaactgagcacggtggtagccatggtggcggacaggagcacgataggaacccgatagaagcaaggaaagaaggttggggaaaattctcaccagtgagaggtggtcctgctggtgctatggtgcggcggaaaaaggtcgacgacggcgaaacggctgcacagccggccttggctctggcagaagaaatttggggatgaaaacgagattagcacttgatgtctacagaggaatagcggacttcggctcgttcactttgaaggagagaaggtctggaggaggaggggaaacaagggagggatggcaacgagcaactgcgtggctgttttggaggcggctcgagcgggcgtgtgccgagctcggggcggcacatgagcagcgcaggcaggagcgaggccgcacgcgactagcgcgtgcgaacacgagcagggcgcaggacggcgcgtgcggcggctgcctcggctgggccaacagcagtcgtgggccagcacggcccaaacagagggaaatgggcaaaggaaatccagaatatgggctggattgctaggaactcggcccgagaagaaacacagtgatctatttgaatttttggagagatttttaatagaattttggtaggatatttttgaataggaatcgatgagattgggggttttagaatatttgcatgattactccggtttaacttaaaataaacacgagctcttctgatgattttgggaattttctttgggatatctcggatttggtttggagagggaaactaaataaagttaagcggaaggtggaaacttagaggaaacaaaaggaatataaggattgggaggctccaattcgaaagaacgaagaacatcgactttagatattttcgcaaaaattttaccctgaaaaatttagtatgttacatgaatgtaagtataaaacagagggttgtaaaacataggaaaaacacatgaataactgtttgattggaccgcaaaaaaacacagaaattagaggagagataaagattcaaaggaaagtttccgtgaggtagaatctcatgttagtttcctccaaaatttgcatggcattagccattccataagattcatttctttgattcgaagggagatatttaaaaaaattactatagtaatgaaagactctaaaattctgatgaattttctttgaatcaatagggataagggtgtgttcgttgtacctggttcccaaccagaaacctccacacagaaaatggaatgatccattagcgcgtgattaattaagtattagctattttttttcaaaaatggattaatttgatttttttaagcaactttcgtatagaaacatttataaaaacacaccatttagcagttttagaaacgtgcgcacggaaaacgagggagaggggttgggaaaaggggcatccgaacacaccctaagcattggagccacaatgagcataactatgggtgtgtttagtttctgaaaaaagttggaagtttgaagaaagttgaaagtttgaaaaaaagttagaaatttatgtgtgatggaaagtttttgatgtgatatgatgtgatgaaaagttgggaataggggaaactaaacccggactaggctgtgtttagttccttccaaagttggaagtttaggttaaaattaatacgatgtgactaaaaaattgtatatgtatgacatgttaatatgatgaaaaaagttagaagtttggatctaaacacagccctatatacagtatgttagggagcactgttcgacttgcccaatctacgggccataccggaacgatctgaccaaagcgatcgataggacgtcgtcccgtacttgtacgaacgagacgacgcaagcagcgcagcgcagcgccgccccgcgccccggcgcggtcgaacgatccaggagacaaaaagccggctcccgttaaattgccttccccccctgggtgccccgcggagctagcagagatccgatcccctctcccccaccaccatccatcgccgcgcgtcaaatcgaatccagcgcacgtagcattcgcgcgcggagaaccgcgcccacgcagtacggtacacggccgcgtgggcgtctctctctcccgtccgtccgtctccgatcccggacccggagtgggcggaccagaccgtgcctcgcgccggacccggtgcatgcgcgcgcggagatatgcagggtcggcggggataggcgggcacgcacgcacgttccgttatgatttctcgtacttcaccgatctcccggtaggctcccctcaatgtcctgtatcggattacactaaccagaaaaaaaataaaaaaatcttagatttcatttgcgtcaccggtattttagagctcttttaaaacacatgatagagaaaacacagcaatagataaaacacaaaaattgaaatagaaaacatagaaaatatgaagagggtccctttgatagcaccataggaaacaaaaaaaggaaagaaaaatttccaagagattagacctcttagggcctgtttagatcccacccaaattttttcaccctgtcacatcaaacatttgaacatatatatgaagtattaaagataggctaaaaaaataactaattttacagattgcgactaatttgcgagacgaatcttttaagcctaattgctccatgatttgacaatgtggtgctacattaaatatttgctaatgacggattaattaagcttaataaattcgtctcgcggtttaccgacggattctgtaattagtttttctattagtacccaaacaccccatgcgacaccctatataatacccgatgtgacacgtcaaaactttacacccctggctctagacacccccttacttattttcctatgaaattgagccatagaaatataattctatagaaaaattcttaagagtcccattggttgccctaataagccaaagccaaagttaaaatttaaattttgagatttgctctggtccaacaataccagtacctcacggtaccaaatcatttctaatcgttggatctagctgggcaggatgggcattgttagatataacgatcggaaacgatttggtaccataagataccgatacctcgaggtacattttattggactggagaaaatctcttgaattttcaaacttaatttgaaaggcaattttaagatattttcaatatagtttcttttagcattagtttttaagtcgctaagaacatgcataaaaattttttacaaaaagatgtttttttattttctaataagtcattttgacttaattagtaggaaatatgagcaaccgataagaaccttatactttcctatgaatcaaagtatttcataggaaaatttccttaggaaattaaatcattcagaatttctatggtaatcctttcaaagggttgttactagttgtgtgctcgtggtgtgttctatacgtataccttaggctatagaaactcgttattgcttatctcctccacacggtgaataaaagtagccacgcacggttagtgcgcggatcccccgcacagtttactaaggccctgtttttttaggtctaaaaaagaagtccctccactttaagtccctttaaatctgtagagtcccaaacaggagggactaaagtgctttagtataagtccctaagggagtagcttattgggactaaagtagctcttttccacctgctgccctcatgcatgggtatggtgcatttctctttgtatgattttaggggtaacatggtcattgtgcagcgtatttaatgaactttagtcccttttagtctctataacaaaacagccatggactaaagtgattagttctaggactgaaataagtccccaggacttatggatccatacaccacctaatgtaccgtcgcaatgacatgggtgtgactggtactatatatacagacagtataaaagtgggcgtcatcatgcatgtccggatggggtgaaaaggcagtggcggttagtcagcatatttgttagagttgcaagttgcaaacgaaattgttgtaccaaaagtgtattacatgtgcatatcgcatataagttgagcacaccgttagctatttaacaataacctgaattatcaatttatcatataacattagtcccatgttttagctgttgatcaagatccagccgtccattggcgcgcgagtgttaaaactatcctagctagataatggacgactggtgcccttaatgactgagcttagagagaaatgtgccgcgcagttcattcagagaagctaaatacgaggcatctgattcgcatccaacggtgcagatcgatcaaataaaattgtgtaaaattcacaaaactataggcattttgcataatttatcacaaaactatagatttaagatcttgtttcacaaaactacatatttagtatgtccatttatcacaaaactacagatattttatacaatttatcacaaaactacagatttaaaaacttgtttcacaaaactacagatttagtgtattcgtttatcacagaactacagattttagtgtcttcatttatcacaaaactacaaatttagtgtctccattatcataaaactacagatttaacaatgctaaacctgtagttttgtggtaatgaagacattaaacctgtggttttatgataaatgaagatattaaatctgtagttttataaaataagtttttaaatctgtagtttgataaattgtgcaaagtatgtatagttttatgaaatttcaataaaattttaagaaagcctcaagaacacctcacatgcatgtatacattaatttgtactcggtcggggtaagtaggtaggacaagaggatgcctccaaacatgcacccacgcccacacaccccgtcgatcggcacgaaccgtacgtacgtttacgtactcccaagcggccggggaaggatcagatcgtgtcgcgccggatcgagacgtgccgcctgcatcgatctgcatggtcatagccctgtatccgtcagctaagcttaagctaggcgcgtgcatgcccaactccggccagcgaccatcagacgcatgcacggatacacgcatgcatgcgctttctttcttttgctctcgcttcgcttgcatggctgcacgcgcggcaggccatgcaagcatccacggatgcaaacacggcgccacggacgtacgtcgaaatcatggtacagtacacagtacgctggccggccaccacgccagcccagccgcatgtagcatgcagcgggtagcggatcagcgggcgagagcggttgcgttgcatatattcgcatgcatgcattgcatgacagcatgcgtattactcgtactgctctctccttctcaaaataagtatagttttagtattatttatattcaacgtttgaccattcgtcttatttaaaaaaaattacgattaatatttttattgttattagatgataaaacataaatagtattttatgtgtgactaattttttaaatattttctataaattttttaaataagacggatggtcaaagcgctaaatactaatatctatggctgcacttattttggaaggtagtcctactataggatatggcacggccatgcacctcatctcactcacacactgtgcatgcctctgatcgagcagtaagctactgtccaccggtccgatattaaatggagctagtaggagctatactaggagggaaggctgtgttttggagccttcttgttgtcacggcatgcatggccggagaggagagtactggacgcatgctctgacggctctgatctgtattcagacagagagagatgaagagaggcttctatagttgtagtattccgacacggagccgaaccgtcgtatttacaaataaaaagtaacttgtgaataaaacttatatatatatatatacatatataaaaataaatttcgatgaaaaatcttaaaatcagcttcaaataaaaaattaaaaaattaaaatttgattgataattataaatataagcgaaaaaatgaggggatgtatgcctggtcgtgcggtgccggtgccgagcccagggaactatgggaagtacagcatgcggcggcggggacgcgcgccgccccggggggggggggggggggggggtggacaaggagatcgggcacgatccggaaccggaaggaaggctgcctgatgaaaggcgccatgatggcttctgcgtcgccctgccctttcttctgttcctgcttgtgtgcagaagacatgctccctaggtagggccggagcacgtcgtacctcgcctgaggcctttccatttctgcacagtcaaccttttccttttcttttagagcgacaacggatcggtcaatgcctgccctacacctactataggcttgtttgggagaacttaaaagtctgataagcaactggatggtagcagcttctcagaatctggaaaagctgaatttctcagcttctgacttctagtttatttcctgaattctacaactacagcttttcagaatctagatcaaaagctggattgtttagaagagtttctgattctgtgagaagctgcagcagctagaaactcccccgaacagaccctatataggcggccggccgccccgcgtggacgcaggcgttagtgaaaacagcgatttgtggacgtaaccatccgtgtagaaattaatttcgtcgacgatccactacaaagaggtcatttcaaaccaaatactaaaatgcatcacatgatagttaagaccgaactattttgtttcggtcagttctggttggtcttcagtcatgaccgaaatagcagtgggcgatggtgatggggaggttggaagcagaggtggacgacaggggaatgatagaggtgacaaggcaaaacgaccatattaattttggttcattacaattgacgactgagttttcgatctcgcttagtttggtttcaatgaattgtgtatacccctatagccaccatatacaagcattgtcaaaggggagtagctacattatcacgctatttttatactatcttaaaacgaagtcgtccaccttcccttctactgtgtgtatcacattcatacacgaaaaattatcattgggtacaatgttttatcttcaatcacactactagcccatctctaactatatatatgggcatgatctcttacaacatctcatattactagttccaaaaaataatcaaattattttaacactgtatattccctacacttatattatattgtaattacgctataaattctaagtttatattgtaatttcaatgtaaggtggtgtttgaatctcatgaagatgaaaattaagtatttcacacaaaatgaggtggtaataatatgtgattaattaattttaaattattaaaaagttgaaaaattgattaatccgatattttaaaacaacttttatatatttcgcacgaaaaacaccgtttaacagtttaaaaagcgtaccacagaaatccaaaagtttatccaccccttggcttggattcgaacggggcctaagttccaatatctacaatataatttttctagtgcacaatgtataggagaattatgattagaagtaatttattacgtacttaaaagaagagatagaaacgtactccatttacatacttcctcccgttttaaaattattggcgtttggatataacctcacgttatttacgagagtatattcattttactcaatccgaacatattataaacgtaattgctggtcttgtgctaatggtagtcagtaacgatattttttagcgaacccgtgccaaaacgttaccgtacgcgttggttcgtggcagatcgatgaccgggccggcgcctagctcgttgggatagaacaacaaaattaatactccctccgtttcgttttatttgacaccgttgactttttagcacatgtttgaccgttcgtcttattcaaaaacttttgtgaaatatgtaaaactatacgtatgcataaaagtatatttaacaatgaatcaaatgatagcaaaagaattaataattatttaaattttttgaataagacgagcggtcaaacatatgttaaaaagtcaacggtgtcaaataaaacgaaacggagggagtacgacctctaacggtggatcgatcgcctgcatcaccgcgctggctctatggctcaccgttcatgagaccgcgcgcacgggggctgtgcgcctgtgtgcacgcgaacgcgacccgtacgtacgtacgacgcgtgtgtggccgcgcgctgacttcgatcctcctgcaggtgtgttggtggatcgatcggagtagagagctaatgatgaggtgattaatacgcgcgcgcgggccacaaaacggcagccattgacttcgcgcgggcggggcgagtccatgcattggccacgcaccggtggcgtggacggctacctgcactagctagctccatcgatggatggattgattcatggcgcctttctccgaataattacagtatcagtaggagagccaattccctgtactcccactaaccaccacccccctgcaggtatgagtagctagctagctagctcttgatttatggagcacggagtatagcgagcagctagcgccttgccgtttgcatcggccatcccgatcgatctatcgcaagtttcttctgctactcgttctgaaaaggaaccatgtaggcgtagttttcgggcattgggatcggatacaccatcagattgaatctgataattttgtagagtgctactcatatctcaaccgatagatcaagaattaggagaaataatactcactcactttctcctccacttcaaaatataaccatatctcactacaccagatcctcacatctctgacgggatacctgtgacgggcaaacgaaatggtcactgatgaccgtcacctctgacgggtcatacgggatgccgtcatcggtgaggcatccagctacgacccgtcacaggtaactagtcacctgtgacgggttaaaaatagaacccgtcacaggtgaggttacctcacctcaaacgggtttaagtcctaacccgtcacaggtgactagttacctgtgacgggtcgcagccggacagcccgtcagaggtgaggtttactcacctcaaacggctttaagtcccagcccgtttgagatgacttctgccactgtatatatatatgtctcctctcccagcggggcccacatgaggagataaggtcggccggctccctcttctccacttctcctctatctcttccacttcttctctatctctcccctctttctttgtgccgtggcgaggggaggcgcggcggccccgggccggctggggcggcggcgacggcccggccgccaaatccggcaagggcgggaggggaggcgcagcggcgccgagccagcgggggcggcggcggcggcccagccgccagatccggcagggcgggaggggaagcgtggcggcgctgagccggcgagggcggcggcggcggcgcggccgccagatccggcaggggcgggtggggaggcgcggcggcggtccggccgccagatccggcatgggcgaggggaggcgcggtggcggacgacggatctggagccgtggcgccgtggcggccgacggcgggaggggaggcggctgaggcccgacggtggcagcggtctccatctccgccgcctctgccggcgacgcttccagcctctgcctcccaccggctttcaacacccacgccgtcgccgcctcctgaccgccggtcgccagatctggccaccgggaagccggatctggccaccggcgcctttcctcgcctcccggccgccgatgccgccaagtttggcctccgggaagccggattctgccgccggcgccttccctcgcctcccggccgccgacgccacagcggatccagccaccgacaccttcgccacctccacaacctcttccccgactgccggacgccgcctcctccgccgccgaccgatgaccgccatatccggcctccacgaggtcgggggacgcggatccagcgtccgcggcctttcccctccgccaccgaccgccggccgccggatttgtttgtgcttgatgttgtttgtgcttgatttgctcatgtttgttgcttgtgtggatgtgtagtttgttaaaatggacatggatacttgtgtgatgtatattgtcagattgcttcatgtgtagttgtttgttgagatgtatttgatttaaaatacaaagttgttgtatcatgtgcatcttgagatgtatttgatttttcttcatttcgtacatttgggctgaggcatttcttttttttctgggtgatttttgacgtctgtgacgggtgagaactaaaaccagtcacagctgttttgtcacctttgacgggttgcaaagagtcacccgtcacaggtgtgagtcacctgtgacggctatattttttagcccgtcaaaggttttaattaccagtgacgggctttcacccgtcaaaggtgaggtgtagtcatcagtgaccacttgtctctgaccagaaccaaatccgtcaaaggtgagggttagagtccgtcacagatgactggatccggcctagtgtctaacatttaaattttattctaaaatatctaatttatttcaccattactcctatctcaatcaatcacaaccaactttcatttaatttctcaacttcatctcaaattgagattcagcgcggttgcacaaaagcaactgcatgcaattacaaccattcaagacctaacacagacgcaaacaattgctacaacaggatattcacaatggcactctttgctactattgaccatatgtgttgctactatgactgcagtcataatagggatggcaaacgggcgcgacgggcacgggtagtgcctacctatacccgtgcggccgtgcccgtgatattatttgtacccgtgggtatgcccgttactacatgacgggcaatgattgttgcccatgcctatcgtccgcgtgcgccttgtgcccgcgggcgtgcccgtttacgggcaatgattgttgcccatgcccatcgcccgcgtgcgccttgtgcctgcgggcgtgcccgtttacccgccacaaaaaaagcagtggaaaaaaagtctacaagcttctaagttcaaatttgtcggtgacatgggaccggggatatcttgactagaggtttggggcagctgcggtcacccacgtggcctgaccccctcaggggggggtcgggcccgatggtgatgaggccgcccctccctctatctccccgaggggtcgggccgctcccgtttcgaccccccgagggctggggcgccccgaccccctgagggtttggcgccacgtgtgtgggttaggtgagcacagcggcgctcacctaaccgcgtttattgcgggttggacgagcgcctcatgccgcatttaatgcagcatagcgcatgcttatccggtccgtgatcggtcgcagtgtgtgaccggtcacagaccggtcagatcgcgggttagggggcaacaggcggcctgacacacgcctcgccccgtcccgtcggaatgatgagagcctccaggcactcgtccctagccggagccggcgtgggaactcctggagttggcacgtcagccccggccagatacattccaggcttcatcgcaaccattgcaaggaagtcattgtatgaagaagggcagacgtgtagcatgctaaactgacacgtggtggacaagaatgaccggtctgtgactggtctgacgccggtcgcgtcatcagcaaacaaccgtgcttccacgttgcacctgcttccggcggagtggaggttggtatgacccatcccatcggagggtcattcggacagcagccattgcaaatctccgcccattaatgaggaaggacagggttatcccggtgtcagacgatggtacaagccaagttttggtcaaagtaggatgggtccccacccaaaagaagggtaggtagaaatggtgtatgtggtatccccttgagatataaaaggaggaccatgcctaccaagagagaggagggagaaaaagaggagagaggaccggagctggtagacggagaaaagaggagggagaggggctctagagtttgaactctcttgctctccagctctttgtaactccttcatacacagatccaccagaacacaggagtagggtattacgcttctcagcggcccgaacatgtctacatcgctcgtgtcttgcgcatttgctctctcgcgaaccattccacagatcaagggcttagaacctcacttagcgcccccggccgaaccggcaaaggggggcccgcgcggtctcccggtgaggagccccacgctccgtcaaaatcgaacttaaaacatcaaatattctccgcctcggtgtggtgtctctcctctggcagcgatagaggaagggggagagaaataataagggaaataaaagggaaaccgtagaaaacaaagaacgtggcttctacatgtaagttagatttcgcgggtaaatgggcaaagcgggcatgggcagtgattacccatacccatgcccatttacccatcgggtatatcttttgatccaataagaaacccatgggtataaaatggagaacaaacccaactctaatagggtttttacccacgggtaaacgggcaaacggacacaattgtcatccctagtcataatagcaaatacatcggatctggattgactcacaaccaccactaattttattttagctctctccttagggtgtgttcaggtcctttaggaggaggggttaggaccctttcttttcgacacgcgaaacgaagcacgcattagtacatgattaattaagtattaaatatattttttaaaaaaatattaatatgattcttttaaaatcatttttttctatggagatttgtttttaaagttacattccgtttagctgttttgaaatcgcccatgttgaacacgagggatgtgaagctgggaacctcaaacaaacgatcgaattaagccctcgtttgttaaggttaacctcttcatgaaaaaaatccactgtgtttatattttataacaacgaattgaatgacgagtaatcgaacgtggcattccctttaattgaacttacattttgatgatgaatatcagtgctatcatctgcaatttgttcgggaaaataacagttttttttgcagtgataatttaggattatttaagatttgcacagtggctcctttctaggagcatgaaccatcgccattgacacggacaccttacctgtcacaaagaaaaatggggaaataactgctcccttgtccaaaaaaaacataatttagaataaaataagacataactagtactacatccgtcctaaaataagtgcagtcgtgggaatctatgtccaatgtttaaccgcctgtcttatttgaaaaatttaaaaaaagttagtcgcacataaagtactattcatgttttatcatctaataacaacaaaaatattaatcataaattttttttaaataagacgaacggtcaaacgttagacataaatagtgtaaaactgcatttattttgggacggagggagtataacgaatctaaactggagcagatttattatactaaattatgtcatattttattttaggttaggtttttcagtgacggcagagtgccaagagaagaaaatactagcagaggcagagacgatcagacgaatggctggcctctctacccacacccatgccaaggcatgaggatgatgttgtccttgtccacagtgcacagacactggtgcaccgtgatgcacagtcgcacacaggcacacagccttcttcacgaagccatatccctcattcccctctatatataagccagcaagctgcgccatgtcatatcccccgctaaactctccgcccgcgcagccttgcactcgcgtcgcacatatcgacccatccatccggcacgcatgcaggcgcagcaggccatggacgagcccgccaacgcgcagctgtacggccacgctcacgcgcactcgcaccaccaccggagcaagcgcccgtcgcccggtggcggcggcggcggcgcggcgactctgggcgcggacggtggcggtggcggcggctctctcagcgggacgcggtaccgcggcgtgcggcgcaggccgtggggacggttcgcagcggagatccgggacccggcgtccaaggagcggcgctggctcggcacgttcgacaccgccgagcaggccgcctgcgcctacgacgtcgccgcgcgcgccatgcgcggcaccagggcgcgcaccaacttccccgtccccgccgccgccggcttcccggggggaggcggcggcgggtgctggccgtgggttaacatcccgccgcagggcgcggcggcggcggcgtcgcaccagcagccgctcaacacgctcctcctccacaacctcctcatgagctcctccccccacggctgcctcctcctgcaccacgccggccacggccacggccacgcccattcccattcccactcccacagccgcgcacacaaccccagtactcgcccacccacctccgcgccgccgccgcctccacctgccgccgcctcatccgccacgaccgcgccggccaccacgacaggcgccgcagcgacgtccgcgccgggagcggacgacgacgcgtggggcttcctcctgcgacgtgagccgccggaggcggggctcctgcaagacgtcctgcacgggttctacccgaccaggcggccgcacgacgacgcggggccggcgccgaagctggagcggccgtacgaggcgacgtcgtcgtaccgcgtgtcctccccctggggcgccgtcgaggactgcgacgacggcgacggcgacggcgacgacgactaccgcgggttcccgatgatgccgcaggggctcctcgaggacgtgatccagtgcccgccctacatggaggtcttggcggcgccgtcggccgccgtcggccgcgtcagccgcaggggctgagccgaaccggcgacgtcgagatctccgccgcgcgcagccgctcatggcgcgcgtgcatgcatgcgtcaatgcgggcgcattttgcttcgctatcctttgttactatctgcatcttctctaatcttgctgagattacggtggtgttctgtgtactagtttaacttgggatgattgatatcttggctagtactaattccatgcatggccttcttgaaacttgatcttgttgaaaaaatgaatcttgatcttattgaacaattaattcaatcttaatgaaaaaaaatctcgctcattagcatgcatgcatcaacagctagtttgctcatgcacagggagatttttcacaaccagtttgttgtttgcatagtgccatagttcgattaaaaccttttcaactttcagctcttttttgctaaaaaaaattcagctctgatatgatcgaaagctctttaatgccctgcacgtaaaagcagggatgggttatactaattgatggcccttattacatgcacaatctcatggttatttcatcagtgtgggttttcaaccacgtttcaacaaattactagtactacgaaattattatattgccgttttcaattaatagcaacgagcaaatgccatcgtagatcaattctttgaaaaaccgtcgtatagattgactagcaatcataaaaatgttgtgaaacatggggcattgttatagtcaaatctatatcagcacttttactttgaagcgcattatacagtcctactatgccacatccatccatcagtgagctcggcttcttaccaaacgacaagcagcagttgtaactttatatgcacgagttaaatgtaagttgtactcccttggttggacgagttatatctcggttggagtaccaactaaactgaggacacccacaatggttatttataggctctctataagagatccatgcccgcatattttcttacttggaagagattaaatgaagagagagagagagcaaagctatctactaacctggagatagtctatagagaaaaacgaggcaatgtattagagagctatagatacccatgtagatatactactattgaggtggtttactattaatctagtctattgctgagatgtacatgttttatagatagcaccttactttaccattgtgggttctctgagggtgtgtttagttcacgccaaacggaaaagttgaaagtttttgtgtgtagaaaagtttggtgggaactaaacttggcctgaacacaaaaaacgattcaaaggtaaatagtgacataacgaataaaaagagatttttgtaaaaccatctattattccagtatggaactaaggccttgtttagttactaattttttttcttaaaaacatgacatagaatctttgaatacatgtatggggcattaaatatagataaaaagaaaaaaaattaattgtacattttgcattaaaaagtgagacgaatcgtttgagcttaattagtccatgattagttataagtgctacagtaacccacatgtgctaatgatggattaattaggcttaataaatttatctcgcggttttcagacaagttatgtaattagtttttttcattcgtgtccgaaaaccccttccgatatccggtcaaacgtccgatgtgacaacaaaaatttcttttcgtgaactaaatggggcctaatatttcagtcacaacttaatgctttagattatcttcgtgacgcgacaaggttgcaattgcaagtactagccactaatagtgacatttcaatcagttgtaactttatatgcacgagttaaatgtaagttgtactcccttggttggacgagttatatctcggttggagtaccagctaaactgagggtgtgtttagttcacgtcaaacggaaaagctgaaagtttatatgtgtagaaaagtttagatgtgatggaaaagttgaaagtttaaaaaaaaaacttaggaactaaacttggcctgaacacaaaaaccgattcaaaggtaaatagtgacataacgaataaaaagagaattttgtaaaaccatctattattcgagtatgaaactaaggccttatttagttcctaaatttttttttcttaaaaacatgacatagtaatcccatggcatttcttgactctctacgcaaacgtgcgtagtcattgtgtttcttatgccatgtcttctttcatcttatcgtgcaagcctagtatggtggtgtttaaatctcctggagatgaaaatgaggataaagatttaagtgtttcacataaaatgatgtgataataatgtgtaactatttgggttttaattattacaaacttaaaaaatatattaatctgatattttagaacaacttttatataaaaagttttcacacgaaacacaccgcttagcagtttgaaaagtgtgtcacgagtatctaaattttcatccacctattacagaagaaactaacgggacaaaccatactcgctctttcagtccgctccttacatggctttgactctagcaagtgaccatgttatgttgcctttttccacattttcatcaagttgcaaagccagtgccgccgtcaaggccggtgaggcggtgactaatagcgtttgttagttactgactattttttcatacgtcgacaacaatcaacagagcaatagtggatacaaagctagagatggagctcgagcagttgcctgatccacctgagaggtgaacccgccatcgtttctgcctatgtggtggctcactatagaattggatgcaatcccatactttgcagcgggatatctagttaagaatggttgctaaacatatggcaaactaaatgtggtagaaattttagagattaaaaggtgggttgaaaagaaaatgaggtgggagtctatttgggcctatcttctagtttaggcctcactagttgttcctgtagacctaataatctaacagttgatgtttgagggacacattgatcaagcgactaaaatatgttgatgctgtggttcaacatggacaaaccaacaatatgaataatttctatgcttaagttcgatgatcggcctgctaatagttgtagccaaaatcggcttgagctggcccagttgggctagactagtagttcggccatgtttaggtctaaagtttttttttaaaatttttaattttccatcacatcaaatctttcatacacatatgatttttcagtcacatcgttccaatttcaaccaaattttcaaacttcagcgtgaactaaacttcgttgagcaattgagctcgatggaatggaatcgaagaacacgcacgcacgcgattctcgcagtacggccgcggggccccggcccggcgtctggttcattctctgcgcgtgcgcgcaaggatagagaggcgatatgtgtgatcgagctgagcagagtcgtcgcagtctgcatgcggccggtgataaatttcttgttcccttggtgcatgcgtgctgcatcttgcatgctgcgggcgcggattccggagttggtgcttcgctagctagccaaatctcccgtcacccctggcccaaatcaagcggttcaattgtcaattgccctgtcgaccaatccgtcgccaggaagacgtgagcaccggtggttaacagtgcaaagccggcgccaaacgataggtgcagacgtgcagcggagtactcctatctcggatgtcgttgttgtcgcggcggtgagccggcggcaacgcaggatgtgagggtaattaagaccgaacggttctgttgctgggagaggggagagagagagagagagagagggatagtatagcacgtctggattcgcgcgagagttcataacgctgtgcaggggcgcctggaacactgcatgtgtggcgctttccatcgacgatcttcgatggcgtattgtgcgggtatgatgggtatgatgggttgctgtgggttcaagtgaaaaaaccttgcttggccttatagcaagctgtgcgcaccggcgccggagaggtgtatgatcgacgagctcaccgaagaatggcacgtacataaacaagttcaaaccccccttgtaagcttgttgtacacttgtttgtactactattccactccagatacgtatagtacgtattattgtagattccagtacacgtattagtacgtattattgtacgcgcagcgtctcccgagtactaatacccagctaagagcaagtttaatagtatagctgactactggctccaaatgaactatagtctattttatagccaattcagggcctcattgtttgccgtatggcttataagccaaagccaaaatttgaattttaaaacttgatttttaatttgattttgatgctttttcagcacatattttcttagctttggcttttcaatcactacgaacatatatacaaaagttttactggcatatcattttataatcgcttataataagtcattgtcaaccgatggggacctcatacaatagttatctatatacatatactacacaattcgtatctggtcccacatgtcatacacacatgtatcttagagtccgtgctgtagctggctataaatctgtagcccgctgctcttctcttttatcttttatattctcaaaatatatttatagttggctacctgctctaacgggttgaccgccacttttgttgcaccacgcgctatcctacaggacttgcattgcaaaagtcatatcccgattcgtgaagatcttctagtactactactactccagtggtacggtgtagtaacagaaaaaagttcccatcggccatcgctgctacagcctacagcctcctccagctacagacctacagtacagtaggagtactacggtacagcagcggctcctctctcccccgtgccacgcgcatgcacgcatgactgcgcccacacacacacacacacacacaggtcctcacccatcttgtcatccccggcccgccggctggccacactgtgcgcgccactgtactgtccgcgggaagagcatgcgtgcagccgtactggttggttcccagctgctgcatgcatgccgtcgtgacgcgaaaaagggctccttgtcgcgggccgggctccgcgggcgcgcgcacgcacgcacgcacgtcctcctctgcccccgcggccgacgacggcacggcaggctgcacagcgaatccaggcggtggcgcggcagcaggcgctggctactagtaccacccggcacccggccctgcccgccgcgcgcatcccgacgttcgtgtaccgtacgtgcgcattccgctagctgcgcttccggtcgtcgtgccgccccccgcgattgctcgataggaaaacctgtgaatccggccacaacggaggtcggggggtgatctctgttgtgatcatgtcagctgggttgctgatggtccagttcttcacacacacatacacaaataaataatattatatacgtacagaatataattttttttagttgttaagaaagttgatagaattatatgagagaagattataattagatgagaaatgaaggtaggtagaaaaaatgaattgtgtagggttgtgattgattatgaagagaatgttggtaaaaaagttgttatattttttaataaatcttgaaggttaaaagctgttatattttgggacagagatggtactactgaatttgaagttctttgtctctgtcccgtgtaacccagccgtggctgaatatatgcatgcattgtgttctgaaaatcatacgtgccaaggaacacagacgctgccgggctcacaggatctcactgcaccatagcagcaagaatttgatatctcaaatcatggcagagtttgtttggcgctggcagtgcaaagaaaacaaatgcgctgtgccaaagtcagagtccataaattcccaagatatgcatgcatggaccgtgtagtttttttccttttcgcattttgaccgtgtagctcatgcttgggttgctctagcaattttgtgcagggtggtgtccgaacagggaagagaacagagtaggacaaataaactaatcaggcccggccaggccatggaatagaagctggtcagaatagctcgttgggcagggcaggatgcagcagaatgattgcagctggagtatccagaagatgtccccctctgctctcaaaaaggctcctttcttgtgtgtgccttcatcaatgtccatgcttatggctccagtgcacttcattggccaagatttcttcgctatagctgctctcagtaggggtgggcagaataagaccgaaccaaaaaactgaaccaaaaagaccgagatcgagaccgaaaagaccgagaccgagaaattcggttagtgattcggtgccagccatctaaagaccgatttttttcggttaattcggtcatatgcttcagttaaccgaattacccgagaaaatcgaaatttggcccaacaggtgtagtaggcccaataagcccactaaatagaacaaaccctagagggactcagggtggagcagccgagactagagctgctcactgcctccgtgcctcgtatccatcgcgccgcccccagcccccccacgcctctgccttcacctgcatcgcgccacctccgccgtccgcctccagcgccggcgccacctccgcctcggcgccgcctccgcatccactctccagtcagcccacctccaccttggcacctccatcccgccggcaagcaaatccaccaagtcgtcggcttctaaacctaaacctacatgatcttcaccaagttgaacacttttaactatttcccatcttctctgtcaatatttctgaattgtaatcaagttttgttttggttgcttgttttaaaatgtgtttcaggttgctgaaaagtggaggaagaagactaagatgggtacatgtcaagcctaaaacttatttactagttggctgttgctactgcttgatctgtgatgtaatgttatcaacctataacttgtactgtggcagtcgtgactcgtaacttgtgaggttcagacttgagacctatcctgtgataatttggtgcttgatgttgcctattttttggtatttttgtgatatatatgtctgtgaaaaaaagtctaaaaagagggaaaatgttgtcaaaatttttcattcccctcaaatttcggtctgaccgagatcgaaaagaccgagaccgaatttgccggtcataagttttttttatgaaattcggtccggactttccaaagacggaattacccaaataaccgaagaccgagaccgaatttttcagtctgaccgaatgcccacccctagctcccagcgcacacacacatacacagagtgtgtgtgccgtgcgtgtgtgttgtgggcatggcaatggcatgggtgtgactgggttggagtttacgagcaaacacaagacattcaattgcctgcagctgcagcagtgttctagggtttggaaaccaaggacccttgtcacatggtcctgtccctcctatactgtccctataccactcctctgcctacgggtctcactcctgaccctgctggttgtaccaccattgccatactgcttgcagacgtgtactcgatccgtcaggacaaacatactcctacatacagtagttacagtagccgtatgtgtgtgtgcgtacaataccaccagtagtagtacatcagttataactagaaaatcagcgcgccagttggcgcgcatgatttatagcccgtatatattatttttgtgttattaattagcacattgttcataaaaaatatagaaatcaatttaatttctttgaaactcatgcaaaaatcatagttgaatggaattttctgagttccagtttaacataacagatcatattgttgagaaaatcatcaaattttctctttttttccacccatgctattgtttcttcctttgtttttctaaaattataattaagttattaactaattataaaattggtgttggtattttttaaaaaaaacaaagtgtttcacccctcacattatttctacaatattttaacaaatatacatatcatcacattatttctacaatattttaacaaatatacatatcatttttataatatttaacatatacttatcaatatgctccacattaaaaacgggtatcatttgtttattttatgataagtaccgataaaacttcacgtttcattattttctattctttttactcttagtttacttgttgaacaaaatatattaaaaattgtttagtgatcccgtagcaaagcatggagaatcacctagcaatagaaagtggaagggccttgaatcttcgatgattcgtccccttcaccgctcatcgccatcgcggccccgggtcgttggatcctggcattggaactttatttgctgcgttggtgctgggagaaaggcgatggccattagggaagacgacacttgcgagaacaaggattgtcgcgtcggtgctgggagaaaggcgatggccattggggaagacgacacttgcgagaacaaggattgccgtgtcaatgctgggagaaaggcgacaaccgttggggaaaatggcgcttgcgagaacaaggattgtcgcgttggtgctgggagaaaggcatcagccgttgaggaagacaacgcttgcgagaacaaggagaaaaggaggaagatgatggtagcgaaggcaacatcgccctcgtcccttgattgtccaaagctgggtatcctcattgagcccttcttcatccctctctcttcttcctcctggatttggtcgagcttggggtcgtggttattgctaccgtggatggtgaggacgtgctcgacctcgatgctcgttggctggttggcgcatccacactcgcggactatcacagctggtatggctcgacgccctccacttgctccattgagtgagtggatcttgctcgttggcaacagcttccgtggatccggaaaatattgcggtaaatgtcttcctcgttgccgatttacgacagctaacatcggctcgctgtttatatttttttgggaattgctaaaaagttgtcacaagtttttttggcaaaaaaaaacttttaaatgttactgtagtatagttgtagtataactacaatgtaactacactatagttacattgtacataatagtgtaactgtactgtagtaatctctatataagtgatataaagttgcatatagtattttaatacttatatacaagttacaatattgttacggtatagttatagtggaattatattatagttagatttaaaagttgttcctttaaaaaacttgtggcagttttttggatactatttttttcttatccattgtttcctcagcatgcaatctttttcaccagttcttttcgtgttatcgtgtgatttttttcaaccgagtttagaatgctctggattttttcctttgttttatctagactcttcacacacgttcaaaatgaacgtgctcttctggacacgtggcacattttgatgatatgtgaacttggtttttggtttggccacgtggcccaatgatttggtagagtttgcaccctgcaaccagtattttagatttgtgtgcacgcatgttatagtaataatagtatatatagctctatcctattatataattaaaattagcataaatggaaaaaaacagtttgctcgtccacttgtatccctaaccacgtagtgtttgagagcccggcagggtttcccaaaccaccggggtcaggttaccgcgctctagcggtaagcacggttatcgtgtggtaaccgtggcaaaccgtatgaaaccgtataaaatttatcaaaatttcgaagtatattttaaatttatttgaatttaaagaggttatcgtagtttttcttttacagtacactcgcggagtcgcggtaagcgcggtaactctagagcccggcggcggtactgttttgctagcgtaagtaaagggacaacgagaaacaactccgacgcgcccattgtatatttacgtatatcacatgcggtacaagtagctgcacgtatttggggggtacgtatggcagtactgttctccagcacatttgtcgtatgccagttgacatgtctctcagagacaaattaaggagggtcgtagctagccagacacagccacaggcgcggtgtattgcatggtgcagcttttctttttgtggaaaaataggggggtcgtagtgcatcatgccatattgccatgcatcggatgaattgaagatgatggggacgaaaatgcgtgttacatgatgcggcccttgtcgtctcctgcgatcttcatagctagagaatcataactccaagtctccaacgagttgtagctgctaacgatcgagtggtacgaacgaaaaaaaacgatccgccaaaaaaaaaaaacccaacgttgcgtaatgtgattaaacaaaaaaggaatttcagaaaacattgggcctgttcggtaggccaactgctgcggctgcgcacagtgagtgcgacactgttcatgccgactgcgccgcagccgcagccagggcagccggacaggcccattatttgaccgaaattagatcgtataaaaaaaattctaggagagaggttacaggaaatgaaaaactgacagaaattgctgggggatccaactgctgatcacctaagataggaaatggaaaacagtagtagtattgtattgtggacggacaacgactactgaaagtctataactatgaggccagcagtaaactaactctatgaacagtaaaatcataccgtgtgaggggaacagtatttgggagaacttaatttgggccgttacatgtgtaatcggatggtaaaggaagagcctaacgcaactcttgtgaaaacggcacagttgaagccgaatgttatagagagagcacatggcctcgtagaactaacggcccaggatccggtccatgtgggccatttacagattgttgggccttttgagcattaatagatgggctttgagttgtaccagattgggctaaaaacatggggaaaaagtccactttgactcccttaaatatacaccgaatctaattcgtacccatcaaccagaaaaccggttaggacgactcccccaattactaaaaccggtacaaattgactccctaagtggttttagagggtggttttgctgacgtggcatgctgacttggtctgttgtgctgacgtgtcagcccagtcaccaaaatacacatgaggcccacatgtaagtgataggagaaaatataaaaagcgtagggcctacttgtcagccatcttctccctctctattttttcccccaaatcccccaaaaagaaacagtagagcaagcggtcgaggaagccgagtgcgtagttgttgtgcgggcactgcactacacgttgtcgtaggtgtagacgagggtgtggttgttgctgctcagcatcagctctggctcgctcctctcttggtactgtgccgccgcgtcgccggacccggacggccccgctagcggcctcgcgcctggcggcgataggtccggcaagcacttcgccgaccgcttgctcccgaaccgccccggcgctgccgctgctgccggcttgagcgtgcccccgccgcggatgagccggtggattccgaggtccgccaatagcggctccatgtcggcgtcgagcaggatattgctcggccggacgttgccgcacgaacttcttgtcgtggaggaaggccagccctctcgccatgccgcgggcgatgcgtcgtcgctgccgatcctgcgcaccgccagcacggcgccgtcgtccaataccgccatgtacatgatgctgctgcccgccgcgcctaggatgtacgccgacgccttcagtagcgtctccatctccagctccacgtcgccgtccaccgtcaccagcaccgcgccgccgccgccaccgtccttggccttcttgccgccacgtcgtccgtcttggcggcgacgacgccctccttggcggcgaaggacgccgacgtgtcagtcacctcctccgtgtcgtcgctctcgtctctggcactgaactggcgccgcgcacggcaagaattataccatttctcccctcgtcgagtgtacaagaactcctcggcgtgtcgagggacaactccggcgccctcccgatgaccttgaccttggccggcgccggtagccgcatccagcacccgaacttcccaccgctgccgccgccgccactaccggcggcggcggagtgttaacaacatcgcatcaacacggaggtggagctgtaccgccacggcagccgcacccggcacccgatcttcccaccgctgccgccgccgtcacctcactgtaggatacgcgacaggagcgaccgcggcgactggcagctctcgatgccgccgcttcgcccggccttcgcgccggccttctccacccaccgccgcccacggcttcacggcttcgtgcactcccttggcgccttccactccgctccctcgccgccctctgctccgccatccgtgccctcggcaagctctccgcgctactcgccgacgggaagagaaagagagaaataagggagagggagggaggcagaaaggttggaaagagaatgacatgtggaccccacaagtcagtggatcctattataatttttgtgtgtgagtgacaaattggtcccacatatatatttttaaatctaatcttacatcagtgccacgtcaacgccatgtgggacgaagaccaagtcaacaacgccacgtcagcaaaaccgcccttgaaaccgccgagggagtctatttgtaccggttttagtaattgggggagtcatcctaaccggttttctggttgagaggtacgaattagattcggtatacatttaagggtgtcaaagtggactttttccaaaacatggcactcagtccccttccgtgggctaccacaatgcacccgcagctaattaaaggaataagttcactttgtgacccttaaaagtgatcgaaatctaatccgtaaccctaaaccacaaaaccagatatttcgacccccaaactctcaaaaccggtgcaatttgactccctcgacggttttggaaggcggtttcgctgacgtggcgcctacgtggcagtattgactcggtctcctttttcacgtggtgttgacgtggcgtttaggtggcattagaaataaaaaatatgtgtgaaacccatttgtcatttatcaaaagtatggatgggcacactgacatgtagggcccactagctagctcgatcaatataaagagcaaatcatgcattcatcaaatcacatcagattaccacactaatcacgattagtgtaacaatactcacgtacatacactatacaccatgtcgccgcaggccaaatcccaaaggcaaactgcttctcttggtggtcatctccttcctctccgtgttgccatggcacacgctagcaagcggcagcggcaagcccctcgtcactgccatcaccaaggacggcgccaccaagctctacaccatcgccgtcaaggatggccaccccctcgccctcgacctctccggcgagctcgtctggtcgacctgcgatgcctcccactccaccgtcctcccctatgagcgcgagtgcgtggaaatcatcctctcttcatctttatggggcccacataaagcaaggagacggggaggaggaggaagggcggggtcgagccatgggtggtccatcaaattcggtatccgccgccccaatctcttcctccactggctcctccggtcttcctcacgcaccgatttgtgtcgccaccgccggccaactctcgagttcatcgtcttggctacggctggcgtggccgaggaagaggaggagacgacgaagccggcagtggcctcactgagactcggcgacgtctagggcagcgcctaacggtggctggagtgcgtgacggcgatggagcgagcgtggcgctcgagcggcacggggatgggaaagagcaggtcttggggattctctttatataggccggaggggagaaggtcgaccgcacggacggaaaacggcgccggcgacggtggagctccctattgaagacaccggtttaagaaatcgattgagggcgatttagtgcgggattaagcgggatttgttggggaaattgatgcccactacacaaggaaccgatttttctaattaatttagaggagaaacgatagggcagggagatcaatggaggcggcagtgcttgagttttacgggagagatgaacagacgacggacagaggtggaagaagctcctggcgagcggggcccacctgccagcgaacggaagagaaatagaggggaggatgaggagagaatgattttatgtgggccccacatatcagtgggtcccacccatacttttggtgaatgacaattgggtcccacacatattttttatttttaatgccacctaagcgctacgtcaacgtcacgtggaaaggagaccgagtcaatactgccacgtaggcgccacggcagcgaaaccgctctccaaaaccgccgagggagtcaaattgcaccggttttaagagttagggggtcgagatatccggttttatggtttagggtcatagattagatttcgatcaatattgagggtcacaaagtgaacttattccgttatagagagagcacatggcctcgtagaactaacggcccaggatccggtccatgtgggccatctactagattgttgggccctttgagcattaatagatgggctttgagttgtaccagattgggctgaaaacatagcactcagtccccttccgtgggctaccacaatacacccgcagctaattaaaggctgtaatggaccaaatgtccaatggagaccatgtcttgagctgggcctcatccagtcatcctggaccatttcaaccatagcaaagccctactcacagaaggtttttggttttccttatctctcgtgcctttgaatagtcccgatgcatttggattatctatagtgaatttgctgcagaaaagaggtgattgctttgataagatcacagaggctaataatttactattatattcattctagaatataagcatcgttttgctatatacctagatatttcttcataataaatagccagaagcgattatattttggaatggagagaatcacctaaacgtctgcaacggtgcaaaaagaattccgagtcaaagattctttagataaaccacctatactttaatactagtattacttatttgttcagtttagccttcgttaaaaaaaagctgcagttagccatggtttaggagaatacactgaagaaattaaggatgaaattaaggaggcagcagactggcccagctctttacgtactgcaagggcatgttcaccattcaagtgagcaagacatgctatttggcagatatgaatatatgaagcatatcttcagagagctgctagtattattttggtttcatgatagagtagtgcttctactatcattgctcctgaatggatggcaataaaaactgaacaggcagagtacaactaggttggctttgtgttgttttattaatcaccggattatttatttattttacacaagtgacctttttctccttttaatacaatagacttattattgttgtgtactatggctctgcaacgtcgcacaggacttggatcagactatgtaaccagggcatttatataacgtcagtcgtcagacatggccagcttcactattgctttcctcttgattatgtggcgccctacgcaattagatggagattttgaatttataatgccatgaaaagaaatgaaatgcaaatgtttagttgcacaaaagatagggaaaagaaagcctcaaacaaaaagaaaaggaaatggttgccctgcctttgtagagaagtagattgcaatgatgaacccttgaactccaaagcaagatttcaggtgccattcgcataaactaaaccggcttgagagatgttgagctcagcgtagggaatcagtattataaccaatgatggtctgcagccacactatcatggaagattaatactagattaacatgagggacagaattgacgaccttcaggtgttccattcaatcgtatcactcaagttttcctttcttaattatccacccataatcttcgtgtttgctcgccagatttgcagacagggcgtggcaagctctgataaaactaatgtgtttcagctcattaaccgatgagtttgtccagttaatggctataggaaattaaccatgcgtttctgaacctttgaacagctaggtcaaaccctcggactagtagtagagctcaagccatggagcagtttttaacatggacatttcgttagttatgggagtgcgagctctgaattttcctgaaacggaagaatcttgctgcctctatgtcagaaattcagaaagaggaaaaatcacaagtggcgggcaggcgcttgatccgatacaatggttatggaaataaacgggcagcctcaataattagcttgagccatgactaattgtatatacaatataaccaaacttctaacctgcattttaattcttttttcgaaacaacctgcattccaaatcttcatatttggtagtactagtcatttccaagggcggtatagaaattactagtactttggactcgtctaaccaaccaaacaacaaaaccatacaatttcactcctatgaaaaggcgatctatcttagtataaacacaatattttcttagataatgaaataaacctgatatcaagtgcagatgttcacatgttattttcatttaaacttccatatgggaaaaaaaagggaaaaatatacatttctcttaattaaagtagaacttttatggtcgcagacagtgcgacctttttcctttcgactggagttcagacccaccatttaatttactaattgctgcgtctttaattaagtggtgacaagaattggatagaaaaatttatccagaggtgctccacatccactccatttgatttaacaaacgctaagtagctaacctacctatgtcgcgcctaaccgtagctgctaatgaaaacacgaccaaacgcaaacgtagctaattaatctagctataggttatctgagtaattaacacaatcaatcaatcaatttaatgttggacataaattccttgtgaacaaactgctaaccccactttttgcatacacttgatgacttaattaagattataatggtaaattcagtttcccgtcggaggacgacggcgtctcccgttggcgttggtggccctaggggctgcggtggctctcatcggcaccggcagccctagggactgcgacggaagacgatggcggtttccgtcggcgccggcggcactaggggttgcggcagcccaggacggcggtggctcccgtcggtgccggtggccctagaggctgcggcggaggacggcggcagcttccgttggcgttggtggccctaggggcggtggtggctctcgtcggcgccggcaaccctaggggctacggtggcccaggacggcggcggctctaggggttgcggtggctcaagacggtggcggtctgagcactttggatagtagatccttaggaatccggtaaagtggaagccgatcccgtcggttcgtgtctagttggctagttccgactatacgacgaatgatggtggttgagagtgggcttataagcggcgtgtgacgtcagctcacctgaaactgatgaagatgacacaaatggaggttttcatcaacggtgcactaggggcgacagcgactagtagactttcactcgtcaaatctagctgttttaggagaatatggaagcagaaaagcaggatgtgctgaagtcgtttggttttcttttctattttggttgtgttcttttccttgttgagacgtgagtctaagtactattgtatccttttggctgtgtatatccttcgtggatatagaggccagattaatgaaaatccattattaaaaaaaatggtaaattcagttattgaccactgtatgacaatgatatttccaaaagaaaattatcagggccttcttagaatgcaagatgtttttttctcgattcagaatagaattaaactgatcgatgtgaaagtaactttggcctgcattagaagagaacatttaactagtgatccaaccgagtcctgtatctaggagcccatcatgctcatctgatccccagcaaaaacctgcaagatcctactcatttctgagcccctccatcctgacttttgcatgccactctggtccctgtttcacatgtccccttccaattcaagtcccaaatcctaatcaatacccttgctagcactcatcagagttcatcaatgacagtctggtatatgaatagtttgaattgcaaattcccactccctcgcccttgaatcccagaaaaaaaaacacctcatgttagtgtactaaattagtgaaattcttggcctttcaaaaaaaaaaaacattgttagcaaggctagggagttgccgctgatctctatctctccgagcatgtgttagtggacgcttttcacggatgtgagtgtggtgttgcatgtcgtacacgtaatcggaaaaaacattttgaatacttccattatccaaaaaaaaagattttttttcttttttgcatcttccttgtttggcccttgcttctctctctctctctctcctccccaaccacttgggcatcatgatataagtagagccaccaagaaaccatttccaagggctcacagaaagtcaggggcctagccagccagccaagccagtggttataaccaacctcccagtgaaactttcagaccctcccgttttagcaagtgagagaagccctgcgactctcgctcgctcgctcgcccaagatgaagtttatgaaacttggcacccggcctgacaccttcttctccaacgaatccgtgaggtgtttttttcttgagaaatcctgatttgtggaatcaatcaatcaatcaatcttggcatggtttcagactttcagttcctgggattcttgcctgtcgtctgaggtgattgaatcgtggttgcctgatttttgtgggtgtttgttgtgatgttcacaggtctgtctgcacagaggtcgccactgacctgcaaatcttggtgggtgactgcttgtatcagcttcacaaggtaatgggacatgaaagattgttgttgttttttgtttcgctgtggttctagaacggatcttttctgcaacttttgtgataattagatcgtgaattttaggggaattttggatttggttgcatgtttggattgttttgatatcgaaggatttgttgatgatgtttgtttggaatttgtttttgacagtttcctctgctgtcgaaatgcctgcttctgcaagcgctgtgcgccgagtccggatgcggcggcaatggcggcgacgtgatcgagctcccggggttcccgggcggcgtcgaggcgttcgacgcgtgcgccaagttctgctacggcatcaccgtcacggtgagcgcgcggaacctcgtcccgctccgctgcgccgcggcgcacctcggcatgtcggaggccgccgaccgcggcaacctcgccgccaagctcgacgcgttcctcgcctcctgcctcctccggcgatggaaggacgcgctcgccgtgctcaactcgacgcgccactgcgcgccgctctgcgaggacatcggcctcacctcccggtgcgtggacgccgtcgcggcgctcatcgcgagccccgccgccctcccggcgcactcctcgtcggcgtcgccgtggtgggcgcacgacgtcgccgagctcggggttgacctgttctggcgcatcatggtggccgtcaaggccaccggcgccgtccacgagaagaccgtcggcgacgcgctcaaggcgtacgcgcgccggtggctgcccaacgtcgccaaggacgggatcgtcgtcggcgccgaccagccgttcgacggggtcggcaatggcggcgacggcggcaatgccagcgtcaagcagatcgccacgaggcaccgcctcctcctcgagaagatcgtgagcctgatcccggcggagagggacgccgtctcctgcagcttcctcctcaagctcctcaaggcggcgaacatcctcagcgcgtccgccacgtccagggcggagctggtgcggagggtggcgtggcagctcgaggaggccaccgtcggcgatctcctgatcccgtcgctgtcgtgcgtgtccgagacgctgtacgacgtggacgccgtggcggccatcctcgacgagttcgccctgcgccacgccgccgcgccgccgccgccggtggcgctggcagtgagccccgacgacgacgacgacagcccggcgcgttccggcgggcaccggcgctcgcggtcggccgagagcgtcgggttcgacggcgccgcgcggcggtcgtcgtcggccgcgcccgtgtcgcccgacgcgctcgtcagggtgggcaggctggtcgacggcttcttgatcgaggttgccagggaccccaacatgccgctcgacaagttgctcgccatggccgaggccgtcccggacaccgcccgccccgagcacgacggcctctacaaagtcgtcgacacttacctcaaggtgagaatatatttgaataccacaaacattacaaaattctactaatatttaacttgatatcaatcttgttctggttttggatttgaatttgtggttaacttttgtttttgtttttgtttttgggtgacaggtgcactcggagatgagcaagagcgcgaggaagcggctgtgcagggtgatcaactgcaggaagctgtcggacaaggcgtgcgcgcacgcggcgcagaacgagctcctcccgctgcgggtggtggtgcaggtgctcttcttcgagcacgcgcgggcggcggcgatggcgggcggcgcgcacgccgcggccgagctgccgggcagcatcagggcgctgctgcagtccaagtcgtccgggtcggatcaggaggacgacgcggcggaccgcgtggacgagcagcggctgcgcgcgctcgccgcaggcgcgtcccccggggacgactggagcgtggagggcctgcggcgcgcggcgtccaagatcgccacgctgcggatgaagctggaggaggacgacgaccacgacggcggcggcggcgacgacgaggagttcgcgcgcaggcagcaggccgggctggcgcgcagcgcatcgctgcggttcagggcgttctgcgccatcccggcggcgaggccgaagcggatgctcagcaagctgtggccgctggccagaggcgtcaccaccgagcggcattagcgtcgcaaccagtagccattactactaggttttttgtacttcttcttcttgggtgtcttgcttgcattgcttgcccaaggcctgagaatgcaggtttctttgcttgtctcttcttcttgtttctccttttcaattacagtgtcaaggccaagtgtaccttccaggcttccatgtagttgtaatcttttctctctctccgttttttttttgggtgaggcatgtagttgtaagcttaattattaaaaataaataggaactgcacagtttatatacttatgtaaggagtaaggtgaatggatggagtgcaatttacttcatgcacatttcctcaataattttgctgaacatgctgatgcagggaactcatatatcaacgataatcgacattgtattcgcttcgtatctatattcaatgatattcgtttcgtttccattattatagtctaggtttctgtatttgtttatgattccggtatatatgaaaacaaatgtggtagaccgtagaactactgttcattcatatatgagtcgttttcacccctagttagaactattggccaccccaatttcctcttttatagagtatattatttgtgcgaacaaattgttcatgaaaaattatatattaacaaacaagacttttgtgattcaaaggcaccatattttgtagtgttaataaggtaaaaaaataatactaaaaataattgtaccttatggtgtgttcttaaggaccgtaaaaccacttgacaaaatgattttgcaagtatactcgctccattctaaaatataggaatttccaagtgtttagcaaaaattaaggtatagacaaaagattatcttgtagtcactttagtggttaaattttaaactttgagttgacaatatttttctttccaagcatctcattggttgaaaatgtatatatttgtgttcactgaaatcagcatctcttatgacaatagtgcacatcatagttttcatggtacaaatagcaaaagaggccatcaccatgcactatatatatctccctttctttaatgcgcgatcgagaagcaggcctatgattgttatccacttggcttgagaaaaattgcatcctgaagagacccaagagggagagagaaagagagagagaggaacaaagaagcatggaaaatccaggagggaatcaaatgcaccgcggatattattatttcatcttctttttacctgaaagatcccctttgttaggtcttcgcgtgtgtgtaggaggggtatatatgccccggccgcggcatgatgatttggtgatgagacctcgagctcgaaatgttgttgggtcagcaaccactataaacaagaacaggtcagcatgggcagccttttctagccaccctatgatcctttaacttgttgttgctcatcactagcatgcatgggggcaggctcatccacccctggcccccaatgttgcttcaaaggatgtgtcatgtcctagaggaaaatttttcaccagaatatatatacacctcagcaaaacaatcttgtgagatcctatattgctatcatgctagtatggtttatcttttgccccttgaatggtggatgactctctctatgcactactagaaaaagtatttttcccaggcgggggaaatgggtcttcccaggcggacgctggctccgcctatacctcacaatcttcgcaggcaggccggcggtccgcctagtaagaccattatcgtaggcgaactggagctagaggtgccgcctaggaaaatagattcagtgcgccagaaaaaatgtgattgatctgcctgcgaaaataggtacaaaatttttttaaaaaaatgctacaataataatttgtgataaataattttccaaataattaattaattgatgcataaaaaatattagtaactaaaaaacatttgatattaacaaatatacatatattgcataagtgaaaagtgtcgtcaaaatgttacaatatttataacattgtcacttcgaatacactatctaattatattatggcaccgcgttgttccactcccaagattcttgtattcttatcttgtagccaggatgctctctgggtcgaagaactatcctttgatatgacagcactcacggtggatgaagtgacagagatcgcgctgcacatttgtaatgcatgtatcgtcaaagcttgtttgatattctattctaggcagctgcatgcatgaaagaaccacaatatatatattagtaggttctaaatgtgcatttctccaatgcacttatacgttgagtcgagagatttacatcctctgcgttaaccctttatttcccattaaccctgaggaattcgcatgcgtaatacctgcagaggaccgtgcctctagattgcttgtgacacttaatgacatatcatagaaggaaaaagttaaattttgtaattagtaaaacaattggagtacatttactgtgtggactattatatatatatatatatatatatatatatatatatatatatatatgtattagcagcttctctcttgtttgaatctgctctccacccttcttcttgtagtagttgttcgaactgtatgaattttttaccgtttcgtattaaggaggagatttaattgtaaaacattaataatagaaatgcaagagtatcagaatcacttataatgtgattctgatactcttgcatttcgtgcgaaactttctatatgaaagttgctctaaaatatcatattaatctattttttaagtttgtaataattaaaagagtaaattgtattggtggtacacaaacttattaagtgggtgcaatttagtatatgaacttgtaaaatgctcgttttggtacacaaacttatctaatccgtgtgaactaggttcaacatggcttgccaaggttaattccacctaggtgatgttaattaggatatggcgtgcatacgtatagtgagtatgcataaaacatgctatatttataaatttgttctctactttattttgaatttcgtatgtttctaacccttgtatcattgttcggtttttaatatctttctctgcaatcactatatatatatgtgtgtgtgtgtgtgtttacgtagcatcctaatcagcacataaatcaacaaaattagtcatgtaatgtccttttgaccttatttcgcacgcacaagataaattcatgtaccaaaacgagcattttacaagttcatacactagattgcacccacctgacaagttattgtattgccgatgcaatttactctaattaaaactcaatcaatcatacgttaataacatctcgttttttataaaaaacttaatcttcatgttaaaagagaaaagaacaccaccggtgttaacttactaggatcatttggatgatctatcgacagccggcggacagggcatgcggccaacaaatgcgcacgcacgctccgtccgctataggacgcccagatcgatcgacagtcgacagggaggacaggcagcaactagcagctgcaacctatccctccggttacgacgagctgagaaagccagccaaccacagccagccacacacatgctgacatgcatgcgccatcaccacacgctaataatcaaccaatcgatcgatcgatcgattcggccgtttcccttgttgcgacgctcgatcgcactcaccttccagctcccggtgaaacgtgcgatcgagagggatagtatagtagttgttgcagtacgcggctgggctggctgttgctcatcagctcgatcgatcgtgcagatcaggagaagtacgtacgcgtcgcgcgctgtggatggatggatcgatcggaatcattgtgcgtgcgggttggcatatggcatgggatgcagggcagcagggttgggatttttaggaccaccggcaatgcagcgatcgatcgacacatcgtcggcgttttgcggaaatgcagacgagccgtacgtaacgtggtggctggctgcctggctctctggcccctggccctgccctagccgtgggggtgatgttcagcgttgcactttttcaacttctactttcacgtctcttacgtacgtgtatgtttctaaattactaaacaatgagtaattttttttaaaaaaaattgtttttataatcaagttgtttaatttataaaattgtattatctttttaaagtttttttaagttaatacttaactaatcaatacgcttaaatccgtatgtaaaattttcgaagggaatatagatactgtttacacatttggccggcctttgcatggcgcacagttgaagaatgacaagagaaaataagatgaagagagagatcaacgggactacatatcccaccgtctacaataataatatcttaatttgaataggaatttttttcacctgagcttatttatctatacacaaatggaggggagctgccatatctaaagtagtgaaaaaactaattttccttaaataaaataataaggcacgtcatctactaaacatggactgtccaatttctattccgaaaactttaggccgtcagatattgtgattggcgaaatatttttttattctttctctagaaatttctttgacaataatgtctttctacgttcatgaggtaaaaaaaagagcgggactcttctcgttaactagataaattaattgaccatagattatatcgacctccatattaaatcaatcgcacaattgaaaatagcattgcgtttcatctgttttatgttcaacagatggtactcataaattcacatggtacacacgtaacagtgacatatatatgggcgtacttatattatatccatgtggctgctgagatttctcgctttaccccgacctggtgacgtgctgatgatggcattaatcagcggccaggccgacaaataacgtggatgtcgatgtacaaattaatcactccacatcatcgccacatcaactgggaagttaatcaaatgacctcataatttgtcttgccttgctgcacaggggacacgctgcgagcaacgccacaatctcacacaaggcaaagggagacgcagatcgacaacctgattaaccctgatgcacaagtgtgcacaggcaacatggcacatttgcaaccaaccaaaaaaaagtcatcatcgcatcgactagaagcatcaatgctactactacatgcttagactaggtacaatagcgctataaatatattttaaagagataaaagaaaagagagaagagtagcacgctataaatctgtagctagctgcagcatggactccaacatgtaatgtgtgtatgatagatgggactaggtattacacagtatagtaaacaactattatatgaattggctattacattagtatagttatagatgatttggagttagtagttggctatactattaaacttgctgagtaggtaattaatcaatcaatctctctcacacacactctctctctctctccatgtactacatgatgcagagacagcatagctgcaaaggcataaatctccagaattgggttcaggaccacacatgcatgattaagcggcatcattgagggcctctggcgatttgtttatggatcttttttgtggttaattattctggagatgttagcaagatcctaggcaataacccaacacaaagccctcgtcacaggttgttttccaggctcgtttgtacttgtatctgtttgcttcttcagttagttatagtttaattatccgtgaaagcgcaaaagtacagtcctagtgcatgtgcacaagaaagaaaaattgtgtactagtgtacgtacgtgcaactagatacgaccagataaattaattttgcaaaattaaaaaaaacaaagagaaataaatcggcaatagatataaaacggtggtcacaagcattgaagtgaggccaacctgcattgcgctagtacaaattcaagggctaagctagctagatatcccaagcttccagcatggcaagtcaaaaaaaatgccaaaaaattgtcggagcttaagtttaatccaagcttttaagaagggacgaaacataattaggtggcataattgcattttgtatcaccctaacttaattcccctgaggttaactattgtggggttgcaaggaagatgcctggcaaaattaaaccttgacaggttgttttcctggaccatagctgttatctgtgaaaagcacaaaggacaagagtgtgcatgtgcacatacatatctggtgtacgtgcgagactaggcatgaccacaccaacatttatgtcacttttaagaatatatctataattatctatatgtgctttacatggttttatacaatgatacttaaaccaagtactcatctgatgtggaacgacaaagggtgccagcatgcgtgtctttaacaagttcatgcacacaaaaaaaaaaaaagtcttagccacccccctcacagtaagatgcgtttggtttcctacaaagggtcaagtcaagtctggcttgtatcattcgacctggtttagatgagtctctttgagatgtgtaaggacgtattcaatctgctactaagggtgtgttgagaatcccctttcccaactcacacctctctttttccacgcgcactcttttcaaactactaaacggtgtgttttttacaaaaagtttctatgtgaaagttgcttacaaaaatcatattgatccatttttttaaaaaaaataactaatacttaattaatcacgtactaatgaattactctgtttttcgtgcggagagtttagttccaaactccccccagcagcgaacaacacagacgctaggagaagaaaacctttatttttctccaagccggctcttcgcttggtggcacactacacccaccaccacttaggcaagtcaaggcatagttaggggtgaagacatgcataaaacagctaaggcattaattaaaataaaaatactatttaattttaaaaatattcactcttctatttattagctcatccctacacacgagaatttcttggctcttcccttggttttttagggtaccaaacatacaggggcgaagctagcatcaaaataagagggtgcgctaccattgagaatctagaaattttcagtgcaacactgtatattttagtctttttaagtgagaaattaggaatttgggggttcatgtgtaccctcaaacactataaaacttcgtcactgtaaacatgggctttcttactaaaagactctattacctgtacagttaaaatgcccccactaacattattacacagagtctcatttcctgcgcaaaatcgcaaaggaaaaggaaaaggaaaaggaaaaaccaaaattggaccttgggtccgatcggtagacgctggtgaggtggagccatctgggtcatgatatatacgtctgcacgcacgtacgcttagctccaccatcctccatccaagctggttgccctgtccctgtttgggctccctagctccacgagatattgtagagagtacatggatccaaagctatctcctgcacttatggtagaacacatgccactttggctcgttggctgcatcatggcacagggccttgcgatcgcagccatgagccatcgattagggtatatcttctctgttaatttgccccttgctagaatcgatcaaatcgatactattcgtcgaccggagaggcggcgacacgatcgaattgtccctctcctcgtcttatcctggatgagcaccggcctcgatcaactataattttgtggagccactcatagtttgttttggtgacagtagcgatgattatttgtggagacactcattgtttgttttggtggtagtggcgatgattatcttttttcttattttttttggtgaagggtatttttactcggactttacatctaacaggatatatgccatcaaactgtatgatcgaatagaaatagctaagccaaccagagggaggtgaatggttggtatacccaaaaaccaaaacttttagcggaattaaaagttaccctaaatttcgacgaaacacagtccgaccgaagtagacgcgctggtctgaccgcctggaagccgtcggtctgaccgggcttgatcctccggtcaaactgccgagatcaactgccgtcgcctgaaaccgccgccggtctgaccacccgtgatccaccggtctgaccgctggtgtctcgccggttagactgccgaacccgagcaaacacaaatcgaagaactcttgatgtagatgacaactttattacttctctctgtgtttacaaagtgcaacaacagcactcctcacgaaaatctcgactaaactcgaaaccctaactcaactatcaactcaatgctctcaaaagcgatatggggatgcctcacgctccctctctatttatacatgaggtagatagtctaaagccatgaaccaaactcatacaggaagtcctaatctacctaggaaatcttcccgtacaagaaacaaattttacaaactccaaacataccaaatttggactccttccaaattcgactccgcatctcgtacgcacacaatatctccatcatatggcatggaatcttcaccaaccacgtgcattgaactctagcctaagtatcccgcatgatatctgtccgtccggacattgccttatctccaagtcgactcccgatccattaccggcactactctcccgaggcatcaagtcacctacacatgaatcaaacaaagaaaccatattccgagaccaagctatctccaacttagctcattgtcagcaaacaatagtattacatacgtatagtatccatctagaagccataaacatgaaacatccacggatatccaaacaaaaaacccgaaaccgaaaccgacacagagtcggccggtctaaccgctcgatacacatcggtctgaccaacaacccatgtccggtctgaccggacccaaatctctagcagcacctatttaacacctgcaaatccaatcatctccaaaaccacttcgccaataatctccaaatatcaaaaccaataattacagatgccaattgttcatcacagaataagaatcataaacactttgattttacacaaacaacttgatatgaaattcgttcctataaagatttaaacttaaaatcttggagcgctactcatgtcactgtaaccactgggctacatgccttttgcgatgattatctatctgatctgattggatgatgtagaactggagattacgtgtcgtgtgataacgctgcattatatgtatcatttcgtgccagttgcgaaacagtgatgctgagaccgatatggcagcaagagtagcagatgccggcgtgatgcaatggaagcaagcaatatatcattatctcaacaacagcaacaaaagaacagaaagaaagtagacaatagaaatatatcttttagataatgaggtagacaacacatacgctactgtttagttggaaactgatttcttggttagttaatttgtgatttgctgattacagagacgttgtaaaagcagatcgaaatgacgggagcaccggagcaaagagcaggcattcaccggtttttcttacatcagtctccaataatgatagtttttgcagactcactctcttttctccttgctaaaacctaaaagctttgaactttagaaaaggaccagacaaacccaagtacgaataacattttcctgaaagcactaaagcactcccactaatatgattatctgaatcggatttaagataacttaataaaattagtagtactatcacattaattttaaggtttggaggttgcttcagggtgagatcaaccgcatttctaacttgtaacatgacgagctacgtaatggaagtggttgtgtgatcgactaacgacagaggccaaactaaggcacataattttataattatctagaaaacctacaggatgatattagaggtttcttcctagcacgacttcttgtagctagaacttagggtaattttctcattcttaaaaaggtatcaggaggtgtcatattttctatgataaaatttggtacctttagatactacatcctccgtttcaggttataaaactttttagcattgcccatattcatatagatgttaataagtctaggcaacatctatatgaatgtggacaatactaaaaggtcttataacctgaaacggaggtagtaagtatcttaaggtatcaaaaattttttagtgtaaaatttagataactcaaaatgctttgtcaaaaaccataaaatttctctagtatgaatatgaacctactgtcaccttaaaaagagccactttgctctcatgtggaattacatgcaagttgttccttcttctgatatggttgcaaacccgcaactcagcttaacctcagcaacaaacacatgatcaagacttcagagcagagagctagtattagtacagatcagtgatcagtgttgataaaaaccaaccaccacatgagcaaaccatggtggcaccccaatcaagcagtactggcagagcccctaatgctgaccctgtgtgcatgcaacttgagagtgtactgttaggttcagagaagacctaaaaaaatgtggttggagcacggcaattgggcaagcaaaaaaggagattaagacactgacagttaggggaaaatggctgcattaaccctgagatggtgtgggccatgccctgccgggtggcctcccctgtggccagcatggacagctacccccaaactactagtgctcagtggcgacatgcctttttgcagcatcaaggccccagctagccgtccctttgacatcggacggccgaaaaatattttggtgacaacttgtgtgcatcagcaaagctttgggttgagaaaaaaaaaggaaaaagaaaaagaaaaagaaagttatgacttagtatgagactcatggcaatagcttatgttaatgacattattaaacagcaattagcctggtgatgactgcaagattccttttccatgctcctgtggtgacactggtgattccttttctatatgttttaattgtgtgtggtcacccctggctgatggattaaaagtacaaaagttactccattaacagctcactttggctagattagcagggggggtttagtgtaatgtaatctgggccgtatcaactttggtgaacacatacctcacacaatcccttagtttattagccataaactggcgcaatgatctccttgctgagaaaagtttgggcaaggcctcagggattaaagctgtaacgcgtaagtgcttatgcaatgttgacaaaatttgtatcccaagcaatcttgttctgctcagctcttggagttgtataatccgacaccgtttgacaatacacgtaggcatggagatcaatcagggcatctgaaaatctgatctgatcgttcccttgagatagagagagacggtatagagtgcggcaagttgcaatttttatccaaaatcaaggcagaacccatttggatttgatgatggttgtttagtgccaaatcattcgaggttagacagattcggatcgtttaggatccctcctagttgcagtctcttgcctttttgccccaacttccattgtctccagagcaggtgtctcttgcacatgctgttccctcttaaggacaaacggttttgcaagttcccaatattaattcaggcatctggattttgtggtaataataagggcctcaattaatcatgcagttacacgctatctatatgcaagtcctcttgtgtcgacgccttagcttatgcaagttggtcacatcgaaggatttagtggggagaacggttacattcttctctttcaccctctctccccgaatcccaaataggtggctagagtgggggtttggtgtcggttgttagggttaggttttgagtgaccttaattgtatttccttcgttggcctagcagcgaccggtcacgcttaacgatggtcggttcaatgctagtcttctccggaatatgtgtattggtgctgtcggtgcgtggggttgttctttttttcttcgttttcctgtttacgacctcctattggttgtaattttgtaattttttctgttttatcaatatgaactttacactatctagtgcgagtcgttaaaaaaaatacacgtgctttgccatgcataaaattgaatatacatgtgtcagtattgtttgaaataatttcgttccagtagatgactttgcatgattttatatttcaaagatgaaataaataattccgtttccgactacttctaattctgggaaatctcacataacccaagaagataaggcatattagattgttattctcatttagtacattccatcagttctctaaaatcagatgagctaataatgaagcgggaaaatcacctcaaatgtattagttagaatgtgagaacgacaagtattttgatacgagcaaaagatttaaatgctgtaacggcaagtaatacgaagatggaataaatttctggtgcggtttcttcgggaaggaaggaggaactgttcattatcttatcagctacagaaattaatttaaggtcgaaaggctcaactgaaccagaatatgttggggtgtctcctgtgccaatttgctctgttcttgtctgtacgtgcagcgtacgagtacatcagtacatgttcaagataggtaccccgaagagaccatggggaacaaatacataactctgatggcgtcgtcacagaaagaaaaaaaaaacaatccaacatggtcgcattctcccaggtggtccaaacccaactccaaacgcccaagtagagtccaacaaccacactggcgtagacgaagagaagctcggcccggtgggcttcgaggtccctgttacgcgatgccgcaacgcgtacgtgtttgtacgcgcgcgcgaagacacacgggaaagccaatgctgatcgacacgggtgactgacgcggtcgctacttgctaggcgaggcttgatgaggcgcgcgccgcgcccgcgtgcgtgacggacggtgaattgcacggtggaaaccgcgtgtgatgggcctgtgctgctggctgcgccttgcgcgcgcgtcggcccaaaattagggtatgttagttcgcgaaaaaaaaatatatgttacatcggatgtttgatcagaagacgcaaggggtttttagatatgaatgaaaaaactaatttcataactcgtctagaaaccgtaagacgaatcttctgagcctaattaatccatcgttagcacatatggattactgtagcacttatggataatcatggactaattatgctcaaaagatttgtcccgcgatttctctcctaactaggtaattattttttaatctatatttaacgctccaatacatatatctaaagatttgatgtgatgtttttgagaaagaaattaaggagctaaacgaggccttagctgggttagctggggcatggcgcacgggtgggggatcacgtactacgatggataagagacaggtctgtgacagagttattagtagccgtgcaatcaggtagatctctctcccggccagaacccaacacggttctatgggcagcggccgggcagccatgcagctctgccctgtacgttaagccactgttccgatcgagggagcgaactttcgtggaaaaagacgggtgcaggaccggccagccatgcatgcatgcaactatgcaagcaactcgtgcacgctgaaaacgtcttgatcgatccatcgatcgacctgcaaattaagtttctgcaaacgggtcctacttacatggctgaaaccaaaaccgctgtgtgtactagcaaagctagctgtgaagcaacgatgcacaggagctcccaatcatggcagcagcgccttcctcgacggaccgtacatattttttttatttttttagagaagttattttttaccaaacctatatatccaatcggatatatacaacatttttaaattagaaacttatcctataaaacatagaacttagccatcaaataatccactctgaatttcgctcctatgaagatttgaactcaggacctcatgtcgctgcaaccactaaattatatgcccattcacgcggccgtacatgtgccggactgttcggccgcatgtacgtacgcctcgcgtgtatagcatagcacattaccaatatactactacgtacgttcagggtacagtgtccgcggcctgcgcgccatctctcgatcggtgtcccggagcagtcgccgtcttgccggccggccggctggccgaccagcgatatgccgatctcgattcttcccggcctgccggtgtccgtacaccaatcgagctccctcctccgctacgcgcgtggccaagcaaccaccgtccgccgcgcgcggcccacgcgccctggtgggcgccggtgacggtgaatgcgtgtacgtgccgaaacttcgaagttagctcgatcgccggctgggcagccatggtctcaccaaccatggaccgaatcgcctacacaatatatgtgccgctcacacagtttcatttcctgcacgagtgtcaaagaagtacggcgatcgagcgctgccaaaaataatgccacagtttcatttagctggaaagaggggcatgcatgcttgcaggcaggaggagcaggctctggccggccggccgcgcaatcatggagctagccgaaccatctattgttgagttgtgctccaaatttatttatacataataaaggtcagcttctgtgggagcgaagcggaggcccatcaccggaggcttgggccggagcgaaacataggctgaagtggaacccccgcggtatggatcgttatccttttaaggtttcaccttcatatatacttctggtaagccgccgttcggcgttataacctcacctcgatatagtgaagatatttttttgttggtgtccgtggttttttctctcttattttgaaagggctttccacgttaaatctcgtatcttttgtgattgaattatttttttatcgtttatttgcttatcgttttctaacacccatgcacaatccaagtccacgcatcacacatgcgcgccatgccgccatgttttggacgagctagcccagccgagccgcgccgtgcaagcgccaggcgccacctgcatgcaagagtagtatgcagggtagctgatcgactagctgcagcctcgatcggctgcgttgatgcgcggcgcccgccgggaggcaggcggcgtgggcgagcccgggctaccagcgaggagtgccggcgccggcgggcgcagcgtctgacgcgcgttatggttcggatactgtgattcttggatagatttctttccagcttgattggcccagtgtccattcatgaattgtcctgctgcgtttctgaattatggatatatgattgctcctggctcgatcggaggccaaacaatagagagataaagttccattaggattggacttttatgcacgaaaagttcctaccctggggccagggaaaatgaatgaaagccgctactactatttctgctgaatcgctgaatggatcagtaattcattttttctagttattttcgacctttggaggtgcaaaatccaaaagatgccgaaccagatcctgggccagtgggcatttggtacggatttgtggcactgcattttgccaggccggcccatcaaaataacaaggaggcattctcatttctttatagggaaaacagagcggctcctcatcaccatgaacctgggaattatagactcacgaatggctcaaccatgggcaatagaaatgcatgggttctcatgatcatcttttaggaggaaccacgaaatatgcaagtttgtgacaaagagagtcgaactaagacatacctacacacctacatgctctcccatagagttaaatagctggaggtttccaccattacatggccccgaacaagccatcacataacatttcctttccagttttgaggcaaaatatgaggttcagatgaccctatctgagacggtttgatggttcagcacgacttcagctatgcagtttgatcccacaaaaagttcctgcagttcttcgccttacttcgaattctctatcgacctagatgctatccagccagttgccaatgctctcctgtgatccaaactgcaaatcctgtcacaacacagaaaaaacgaggcaggatcagaattggcagacatatgggcaccaagagagagccacgggataaacttacagcaagctgaaaatctggaggtgttccaaggtctacattgtagagatcaggtagtccatacaccgcattcaggttcctgtcaagaatctcattcccgccttgggacagaattgggcggtcagaaggaagcaacgtttcatgatagaaggaatccagaacttcatgacagcgcagggattcatccaagttaggacaggcctgaactgcttccctcgcggcctgggtttctccagcgcaccacgcaggattcccagcatcatccttcaggctaacaataggtatgttagactcctcttcgtcctataataattcgcaaatcaaagaacaaaattaatattttcaaatgatgaacaaatacagcaaaacaaaatatcatcgatgcttagatatgtcatttttcatcatctctcaaaagggaagcatacaactttccagaatgttgaaagtagtggtttgatactccattgaaaacaataatatacaaaactaaaataacctaaggattacagttatagttcgagttatttttagtgatccgttgagtgcagatctgaaaccagattatgaaatgtttcctgcttcagtggttacccaaattctgaccaaattggctttcaattcttcatttgcatcaatgataacagaagtaatgtacattacctggtcctccaagatgggatcgtaattttctgtttcacatggactgttttttaagcgacatggctgtggggtgtttgactttggagtttttggaccaacccttgcagcaaatgcatcagattcttcatcagcatttcctgtttcagacttgtctatctgttttccatgcaactggtaggagattttggagacaacaagctccccatccttttcatcttcttctgccccaagatggtactgatgcatcacccagttagccttatcaggtttggcacctctttgtgaactcttgtacagaaccattattttcttccaaccttttgtaacccccttttcaactatggctttggatttccctgtcttgtgccatctcacatgttcaacagaaacaacatgatcacagttactgatctttcgacgcttgcgctgaccacaaccatatgcatttgaaactctatggaagaaatgaccactggttccatctttcttcatacctgttggccaaaaataagattttggtaaataacatggataaaccaataacttcgaaaacagccatatgccatcacaagacattaagtccataccaggaagattttccggatgtgaatagcatatcccttcatcattatctatagtcggaataaattcatcaatgaatgtatgtggctttgaaccccccaggccaatcttttgttccaaatgttcaagcaattccaaatcagatggatcaaacttgacaccagcaggcagcccaggccactgtatagcaacctgcatagaatgaaattcagcaaaatattgattagaacacataacttctattcaatgtgagctgaaagctaaagttacacttcaactgcttttacacatgcagagattctgtgattaaattctgggatgcattatattccaaagcccaatgtcaataggctctgaaactgagcaaatgatgcctatttctgccattaagataacccagtcagctcatacctcctttctcatcagcaataacctacctttttgcaactattggtaacaaataacaatcaacagattaatcatgtaccagaagaaggtttcagaaaatgggataccccaaaatttagaggaatatcgattttccaaagtatgaacttacaaaagtgtatagttgacaacaaatattgtagactaatacttacatcactgttatcaataacatgtttgcagtttggacattccatctgtgcttctgcacccaattcacttattgggcgactagagcaatgaggtgcatttcttattttcttagcaactcccctaccagttataagccaagacctgcagcaaaacaagcatgttggcatttgttactaaagtaacttgcaacgttagaataaaacgatgtatatgcgcatgacttaggggagttatacttgtgcataatcgattgaccgttcagcattgcttgttagtgaactatgtatagcaagatgagtactatatcattttgatgcccttttctaaatgaaaaccttgattgaaaagtttttttttttggtgtgtgtgtgtggggggggggggggggtgcctgagctgaagtcgcataaccatgggttgaacaatgtagtacaatggtgatacaattacagacagtaacgctttgtgttccatgtaccaaatatgcagagcaatttcaagcaaagaagttaacataattcgaaccataacaaaccgaattccacactgaacgcaaacaaatttgtgatatagctaaatttcagctccatacactgaccacattgcggtatgcactctgacagagaccacaaatacaagtgcagctgaccattaacctggcatgcatagcctagctcacttgtggttgtgggtaggtaagagtgtgtgccacctagatttgattcctctttggctcgatttcggtgcgtattaatttcttaattaaaatgatactaatcccaccaagattttctcatttcttcagtaaaattctgttcaagcaaccgtgagctgtgagcccaagtgatatcctacatcaacttaaatcatattactacttatttcaagtactactactatgtgaggagtatgaaccaaagagacgcgtcattgaaccattaaaaaccatccacccccatccgggtaacgatcagacgagccctaaaaacaacagcagaaaaatgggtgaaggaataggggaaagaaaatatcactagtcacctcgccatggcggcgcgggcggtgcgtcctgaccccaaccacgatcagcggcgagtccgcgaccgcgagcgagacgcggcaccaccggaccaccccctcccgaaccaagcaggctgctcctcctccctccgaacggcgaccaatgcagcggcggcggcggcggcgatcgatcgatcggcgcggggaggggaggatgcgccccccagcgacaccgcgcctccgcccttatccccctctctattgaaccccccgggattccggggcgctgcctgccgccgcaatggcggtttgctgctgcttttgcctttgctccgcttcctccttccttcgcaagccacacgcgctccccaagagagagacaccactcgaggggaaatgcaaataaaaaggaggagcgtttgcttcggtagcgccgcgccaccgcgtcttccggtttctgatttgcgggcccattagggcccacttagaatgtgttcacgcctttggggccgtatgggcctgttgtgcggcccactgtaacttgggtatggaatatcggcacggcataacacatggccctctgttcggataaagttaagatctgattattggttggaagccagtttcaaagaatatgataatgttaaaaaaacagaacttgtggtttcttgtttattgtttgaatttttaactatagcttctcgaatctagatgaaaaatttatctatttagggaagtttttattctgaacgaagcaattgccgtaagctcgtcgaaaaggcttgacagaggaataatattgtttccttaaaaaaaaatgaaagacctaaatcatttgtaaatcattggtggtgttttttttttataaccgtataggattaactcatgaattaacgacaggacagttaacttgcacacaattgtatcgaaacaatcacggtagacgcggccgcgcacttagcgtgtggtgcggttgcacgaaacggactgtaaatgacgagccatctcagttaagtgatcagcccattaatctccctttttttacagctgacgcaaaaaaggttaaccatctttcaggttattacactttaacctgcagagaatttcgtagcttttccagtgatccatcacaatcacataacccgtccgccacgaaggccataaatccgcctatcaattgatcaatccaggtcattatcagcgtatcaggagaagtctagttagctctagccacatgccagcgccacccaaacgaccaggtcgccacagatattgttttatattttaatttggcaggaatttgctttcgtaaaggaaggaaaaatctaacgagctttttggttgcgcgcccatgcggtttgaatgacccggtaaaagcatccgggtcgtcaaacacacagcgctttgtggtcgtaattaattaacaactttgtggtctaattataatttgttaagaagaaaacaagaagatataataagatggtgcttaatccagcctgaaatgaccacgcggtgtatgttgccacggtctacgccgttgttagttcacgacatcaaacctgcattctctacgcgtctcgcagtggtgtaaaatatatagtgggtgagatcgtttgtggactccaaatgaaaactttctcattatctatttaatgttatgtttttttaaaaaaaatacatataggattacaagttttcttgaaggatcatattaatctgtttttaatgatatgttttttaaaaaatattacatataagattacaagtttttcttaaaaaatcttattaatctatttaatggtatatgtagaattacaagttttttttaaaaaaaatatatcttataatctatttttaaatttataataattaacatttgatcaatcattaatgtcaatggtttctcgtgccttgtgtgctgctaatttcctaaaccgaacggagcggtgggtgacgtacacccgcttccgtgcaaaacccaaaaaggaacttcggagttgcacaaaggttgtgtttagttcagcacaaagtttagattttggttgaaattgaaaatgatgtgactgaaaagttatgtgcgtatgacaggttgatatgatgaaaaatgactgaagtttggattcaaactttagatttaaacacagccacatttccgttcggaatccccccggtagagttccaacggtcactgcggctgaacgatctgcgttgctcgggtcagagccgtcacgaggaggaagaggaaaccgacgcggcgaagcaaccgagagacgcgacgcgctcccttgtccccgcgcccgcgccgcagttccatacgcccccacgaacgaatccgcgacgcacgcgcgcgccagcggcgagccaacccaaaccgaccaaacgaacgaaccaacacgagtcgacacgcttcatccgctcggggatgggaaatccctcgcccgcccatgccaaattgccaatgcggcgcccatgtcgtccctggtcagtcatggctggcactggcagcgccgccacccagccgcccgccatgatctcctcgaaatcagaaaaaaaagaaaatccgtgcagcgacgaagcgtgacagaaatagaatttcggttttgatatagttatgtcgccataaatcttctctaattacagtcagtttttagccctcaaagtttcgtttagattcgtacaggactgcttaatttgccatcgtgcgtgcaagcactagttcatactacatacacatgcatctgtgctgcttgctgtgatttatctgatcgatcacgttcctttgctatctacatgtaaaattacactctatataattacatatataatttaggaagttacaatgtaaatacatgctgactattttttggtgaaaaatatggcgccataaatatagccagaattttggttcagagatttttgtgccgataattctacagctatagtatgtgctcgtttgtttgcagggaccaggcaacgtgcgatgctgctgctgcctgccagcacggaacaacaaaaattaagcgcgtaggatcgcatcgcattcgctcgcatacaggggaggtgagtagaaaaatgagccaaatttgcagcgtgttcgtttgtcaatctggctgaggtggacgcccccgacaggaacagcctgttcccaccataaagaaatgccgcgttcacaggtcgcttaacggctcgcatacagggagtactatttcgttagcaaactagcaaagtctagtggtgatggattaccggattacccaactgaaactgccagcctgatgctgctcattgccaaggatgagaggacaactggagaaggccgaacaatagtagtagtgctgctgcgagctcagctcttgccaacctgcaactgccaccaacatgtcagtaaatgtctcagctgctttacctattattgggctcaaattgaaagggaaatatcctgcgtgttcttttgactcaaaacgtgttactactacagcaaatgcatcaaagggtaaacgaattaggaacacagggggacactgtcaacagttacaaggagatgaacatcatagtcggggtcaagaagagaaaaatggtactagtatctcatctgtaagtaaatgacgatgtacaccatggagttggaccagatctagagtgtcactcagttcacaatttacaaatagttttgagttcatatatcaatcatgggagcaatgaataaactcgggtggtataagcacactctgccgagctcctctgcaaaacaagcacgcagcacgcccaagcatgcgctatgctgttaggccttccaactacacagtacaaaatcatgaactcaaaccaaccaccaattggtcgctcaactaagctagtcaatcgtatcagctacacgctgtggcgcgatgttcctccaaaggggcattgtgcatcagatcataatgcaaatcatcatccctagccactttctcgcatgcagttgcccggaagaagatagcggtactggtccattttctccaacagataagcaggaaggtgaacagctgaaaatgtgctagggattggccccaacttggcaatgatctcttggaatgtatactcttcgggaagcatgtcaaaaagatcagctccttggcatatcacatgctgaatccttttggggttcaagaagtacttaaatctaatccggtcaacatggctgtaagcttgcattttgaagacaaaatcatttatgtgccggaagcaaaagctgcagtgccaccctgagtcggccagaaggtcgtctgtttgccggaaatgcgcatacctcgtctttccagcccggtatctgtgtattgaagccctccaactcttgtcgtcaaggagaaactgaaatgagtaaagatagttcctgagctggagatgaagcacttcaggagtgtcatcacaccacctcaagaggttgattgtatggccactggggatctcatcaacatcagacatgatcaaaaggtcatcatctgtgattccagcaattttgataagctggtcaagagcaaccctttgatatgactcctcgacaaatgggttctcccccttcacaaatcttccacctatcataccataggtcaaccgtgattcagcaaattcaaagcgttgacggttttccttgaagtggagatcctttttcaggccagtgaaggttgagttggactcgagcagcacaaattctgacacatatgggctaagctcatgccaacggatatcaagaatgtcaagctcattgctgaaaagcacagcatcaaaaacacggcgtggagtttccctgactttccatccatgcaacttgcataggtttgccatcgagacattttcatgatagtagtgaggaagcacattgaagggctttggcggtttttcccagatcggtcgaagaaagtaagtcaccttctggccatgaacatatataatgaatattagagctggcacaccaatcaagaggatcagaagtgccctcaaatcaaacccccgaagcgcacacttcaaccttgacatgctcagaattgcctttgaaccatgctgcaaatgaatttcagaaaacaagtgagaaatcaggctgtcaactgaaaccaaaagaaacccatcttcttcacataattatttcaacaccaatcaactgcacaaaacacaaatgaaaattcaacagcattggttctaccaaaccagaggatcaggttatcagtacaaattgccaaaaattctaagttgtaacatccaccgtgaatctagtagcagcaataaccaaaggatagtaattttttttatttaacaacaacgttacaactacaggatcatagacagtagaatgtgtgcatattcccggttaaaaactcaatgttcatatccatgataagctaatgcatatccacccaaaaaggaaatcagctgattgtttatgttccatgaaattgttatctttggcggcatgaataatccctcgggaattttgcaaaaagtaaaaggcagatacttgtaacatccttatacaaaggaaaagaaaagaaagattccaggattaggctggacaaccaattcggccagctcgcgagattctaccggcgccagaagcatccaagcttgaacttcacctaatcccatctccagcacaaatagcccccaacaaatagaagattaaaatattccaatcagcaagcacttatgaattattatgatcccagagcaataaccaataaaaaatcgaagcagcaagcaagcagttctgcatccctacttttattcgatccaaacgcaataaaatagccaaaatcgaagcatcaagcaagcagttctgcatccctactttttattcgatccaaacgcaatagaatagccgaaaaaaagcaaggcaccaagaagaacgaggggtgcttgggctttttccgtggaccgagcaatccatcgcgaaaatcccaacgcggcgggagagaaagggatagatctgggtgggacgagagaggaaaacagaatctcacctcgctgccgccgcagacgcccccgcagatgccgccgtcgttcttcttgcagttgtagtagcccgccgcctccatcgcgtcggcaaacgcgcggagcagcaaaggtggggacgcgctgctcgccgccaatggcgacgcgtgcgtgcgtgcgcccgcccgccgatcggccgacgcagcctagcccggaacaccaccagcaccgccgccggcgatcgcaaagcagttcacacgtcccccgcgcctccgaccccggagatagcactactcttctcgcgtgcgccggcgaggggtgtcgggattacggcggtgaggggggtgggaaacggaaaggggaggggggaggttgatgtggtggtggtggtgggagaggaggagatcatgggaaggggagggagggtaattatagccgtttgcgcgtgggcgcgtggcatctggcggtggccgtcgcggtgacgagggaggagaggagccgggtcgcctgtttgtctcaattttggatccgtgttttgtcttcttcttttaaatttagaaatttaatcggattacgattttggaaggaaaaaaagggactactcgtacaatatattttttttaaaaaataaaagaatcttgtaaaggttcatgtggcgtattggtattgggtctatatttttcatctcggattgggatttgggaagccttttcaacaacggattgaagtataatttattaagtattataacatgaacaaaaaaaggattaacatgtttttctttctaaagcaccttttgtttataatttttttctcagaaaaaaacacactatttagctgttcgggatgcgggtgtgttagaaacgagcgagtagaagttagaaatgtgtagtatggaacaccctaactctcaaatcaggcaaatgagaatttagtcagcggaattatgaaataaattatggactgttcagattgtagccagaataaatcttactaaattttggcagtgtcaaaattgtgtcaatttggcaattttctcaagtttttgtaggatttcttatgtatttatcaaagtttataaaaaactaaatagatgcacatctttgataattttaccaaaaaaaatagtatggtttgaaatggcaccaatatgaacaatccgttagtgcatgtagctctgctcttatttaaattaacctgattatgatattaaacgagaaaattagaatttatttgagggtatgtgaattagtacttttttacatgtagagccaatgacaagatcaggaaaacacggacggtataaaaagctgaaaaggacactgcaaagatatggggtgtgtttggatgagctatggcttttgaaaaagtagctgtggcttttcgaaaagcagttgtgaaatatgtgttgtggcttttggaaaagctcgtttagttcaatagctgtagcttttgaaataaatagtcccacttacaagcgagccccacatgttatacacccattggaaaagaggggaaaaagagagagaaaaaacaaagacgcgcgcggcgtcggcctcggcggcggcggcggaggaggaggcctcggcggtggcagaggaggaggcatacgcgtgcggcggcagtggggaggcagacgcgggagttgaccttggcggtgttggagtcggcctcggcgtcgtcggagtcctcggtggcggcggagtcgtcctcgggcgtcggcggagtcagcctcgatggcgaggaggagcggcggcagcggaggcggacgtgcgcggtggcggggcgaggaggagcggtggcggcgacgaagtgagtaggaggaggtgcgacgcccgtggaaagcgatgggagaaaaaaaaacaagcgaaccgtttttttaatggcagaggtgggtaatttttttctcccaaaaataggtgaaagcaggggggtagatgtgcttttgatttgtactacaccaaaagctggctttgggtaaaagcagccgtagcttttgaaccctttggttggcttttggcttttccaagcaggttgaaaagtccaaccaaatacacccatagtataccattttttaaggaaaaaaatataaaatgagatgccggggttaatatcgatttgcgttaagaccataatacacactcaaatgtaaaagagccaaatggatgatccgcctctagatggggagattggcaaaattcatgagcaacactatttgttttcttctagttttgatgactcttttaacttttatttgtgattatagggaagatgaataatggttacgattggttgagaggaggagtatataaaaaatagttttgtttagaataaaattattgcgctagaaaccaaacgtgtttctacccatatctgtgtgtaagtatttcccatatttttattatatgaaagacatgtgcacgcatatcactatatatgcacatcgcacacactctccgtaaatgtgtccttaacacaccctcaaattaaaatgcacatggcaacgacaaattcataaccttcaattaatttcctttttatctctctctcattatatgataggtaaatcgatttttcagtgccaaatgtgtatctttggcacgctgttagtttgaaactaagtcgaaacaaatacacgctttctcaaatatctttggcacgaaggaaaaaaaaccctgtcctggttggattcgaatattttttgcatggatgataatgacgaggatctaggatgtaataacaaatcaggcatctcggcgagatgcttcctatatgctgatccatgtacttagtgccctgcactttttttttctctctctccattcattcttttcatgacatggaagtatggaactatgttagactggggctaaatcatggcagaccatgtgcaaattgccaactagcgtgtggccttttctccatattaataacatatgctaactgcttgaatgaaataaagtaatcccaaacgttaaaagcagctgagcatgttaaggtgtactactaagatatataaagtattgacaatctagtaagttttcttccaaagagaaagagaaggttatgaaccgataagaaaaacatacatttagtacgtcctccctccattcttatttccatacgaagttggttagttcaaattcaagtaaccaatgttacataagaagaaaaaaaaaagggagcatataacaaaaatactgcaacaatgtgaccaattctcatcgaggaaataagcgcgcgcacataataattttattacctgataatgaaaagaaaatcaacttagtactcacataagctaacagaacggccatctcgaagaaataatattagatattttctccggttttcaaaagatattgccgttaacttttaaaaatatgttcgatcatttatcttattcaaaagctatgaaaacatgtaaaaattataagtcatgtgaaagttacctttagtgataaactaaaccacaacaaaaataaatgataattattatgttttaatacgacaagtgtgtacttataatcccataactgattaagaaaaccattccaactgaatcattgagaaacacagcagaattgaacaagtcattgcagcgagtgacgagtcggtcagcggagcatatgcagcaaacactcgaaacaatcagattctgactgcgcggcgcggttcctgtgtcctgtcgtctcttcttctttccctgaaaacggaacccgtcaacactgcatcgctgcttctcgttttcgtcgatcgataagcagcatatgctgtcttttcttttcttcttcgttcgagccaaagcccaaattaaggcaaattatcaaagtgcagagtttgtaagtgtcagcgttgtactgtgtaattctaagaagaaaacagagtcatgtgccgcgttgtgttttcatttttcttattcttccttgtatcgactgctcgtcgatactacgtacttctccttggtggagctttagctaaactggggcttttaactatttgccactcttacggatgttgcttaacgatttgccactaggcccacatgtcatagacacatgagggcccacatgtcattgacagggtgtggcaaatcgttaattgccatgtcacaagagtggcaaatagttaaatttcccagctaaactgtaccacggtacagctcacatgagtaatggtttttgagtttctcgtaatgtataattctacggtcgtcgcgaagtcatgtttgatatatctgcttttgagattttcttgagtaaagtataagttgtgccaaacgacagaatgatgcagtaattgtcgagtattttctataaacttgttcagattgtagctaaaataaactttactaaattttggcatgatttcttatgtacttcctccatttcacaatgtaagtcattttagtattttccacattcattttgatgttaatgaatctagacatatatatctatctagattcattaacattaatatgaatgtggaaaatgataaaatgactcacattataaaacggaggaagtattaaacaaagtttggcaacaaactaaacatagacatatttttagcaactatgccaaaaaaaatgatatggttgaaaattgcatcaatctgaacagcccatatgtataaaaaacttaacctagcaggggtctacaacgaatctagatatgaccctgctaggttgagttttttgaaatggagtgagtaggtttttaagaatgagctaaagcaggtactactcaacactagatttttctataaagtagtatattctacacagccatacctatataagatggttgcagcaaaacgcacacacgatatcaaaaatataaatgacaggagaaattattccttactctcttcatcctaaaatataaaacttagaatcggatgaaacattttctagtagcctgttcagattcatagtactaaaaaatatcatatccgatttttttaataaatcatatccgattttaagttcttatattttgggactagggaatactcctctctctccaaagaatatttggaatgagcttcagtcggtggtgaaccagtgattggtacatgaaccaaaggagctagccgttgcctccggattaagataatctgcactaaggcagagagctcatatgctaacaatagtctactacagtaactacaaaatggtactgtagcaaaactcctgtagtaacagtgagcccttaggtttaatattgagcctctcctgtacatagcacgctacaatagcgatgtaatatgaaccgttagattactgttccttatctgtgttaggctattcccaactcaagactctagacatagtttttataaactccacatcatcaagaaactagtactagacactactcttccaatacaaacaccactattccatacttaaatttaatgctacttatctcacatgatgttttggatattgtgtagaaatcaagtctcatgcaagacatggtttccttctattttctcatttattcgcttgccacatcattttttattttaggtgacatcttatttaatgctatagacaccatctcagtcattgggttaggaatggccttagtacctctaagagcaagtctaatagtacagtccactactagctccaattcatctatagtcaatctaatagccaattatacaatagttcttattacattattaatatatggtcacgcctatcatacacacagtgtgtcttagaatccgtgctgcagctggctacagatctgtagcccctgcttttctctctcatcgtttatctcattaaaatatgtttatagctggctaatagtctgctattataccttctctaatggagacaatctgaattctacccacatgggcatgtaccccgggccacatggagtattatgtgggtattggcaagtgcccaagcacactgcattttgattcggcaagtgacgacttgagtgtttattcctcccaacatcttaaaaaaaatctaaaattaaatgtgatataacgaatatggatagaaacctgtctaaattcgttacgaatccgaacagactcctgtccagatttattatattaggatataccacttttaattataggtttatttttgggacggaagaagtatgatttagatgcaaaaaggtattgagccgttgctggggtcaccgtgatttcgtcgtcattgaatgatgggtacttagacgtagccatgtggataatttaagagcgcattttgcaataggattcaacttatctgtctatttccgtacgtggatgtgacctaagatatggtttacttagtttgatgtcgtaacaatgaaattcggtggtatcaaagccgggacaagtttttgcgattatgaaattcgttttagtcttggtacagttagaaaatgattgttgttttttttttcttaccagccctagcgcactccgataggaattactacatccgtttcacaatgtaaatcattctattattttccacattcatattaatgttaataaatctagatatatatatctatctagatttattaacatcaatatgaatgtgggaaatgctaaaataatttacagtgtgaaacgaaggaagtaccaaaataaaaataaaaaatcatactagtacattcgaaggaaacccggaagaactattaaaaaacaagcttgcgttgctgttcttgacttggaccaggcaagtcgtagccttttgacgtttggtaacgccgctgtctaagacgacttataaaaaaatttaacatctgtcgatgcatcgccattgggacgtgcagactcgatcaacacgtacgggcagtatctaattaagcgcgtcattttctgccgttcgcagatactataccgtctaccggcccggttgcactgccaaaaccggcggcagtacaaaaccctgcattttctgtaatattgttccgtctctctcatcgttcttgatagtaaaataataataataataatctaaattaaaatgtgatacaatcttaatattatagatctgaacagaatgtctagatttatactattacgatgtcacactccgttttaagtttgtttattttggaacggaggggagaaattcgaatgaaatgtatacgttgtttcgtctgaatatatcagagaaatgagttcttagcaagcattttttttaagcacagtcccagtgcaaattctgaacatgaactctgaatctctgataatgccgctgttgtcttgagccagaataattaagctaagaagataagacaaatacggtatttaaggcttaatgtcactgaaatctactcccttcgtccatcggtccatattgtacatgaatctgtctcgctgtcatgagttcttaataaatgctaaaaaaacgcatgttgtttgtctgaaactctgaatatatcagaggaatgagttcttaacaatcatgctattttcagtgcattcgttgtgaaaaatctaaacatctctgatgttttcttgagctagaaagatacagttttggttctggctcttgacctgtactgcgagcttgaaaagtcggaggccatatccagatatatatgccatttgtcgcacagatttgaagagtattttgttccgttgcttctacctcagccgttaatcttatgtagaaagataaagccagagagaaacacaagctacaaagataagttgtgtgcgtacagcttaccaaagcaacaatacaaggagcaacaagaggaaagcacaagagaaatctgtggactctgaactttctgaacttttctgaagagatagtggactctgaacttccttgaaactgcttgatggcctgtaggcttatagttagcctgtggatcggtggatgttcagaaatacagaataatcagagaggtaactagcactagtataattcaactagggcatctcttaggcagtgcttatgtccaggaaattatatatcatggaacattaagagattattgctgcagagttttttttgtgccaaattggaaaaggagtagaatatgtaaacatatgcctgccagcgccaaagatgacttggaagcaagtcaatgaggcttactcatgcatagcttcaacaagttcaacaagagagatactccaaattcttgcattttggcacaatggccgttggctgctgggtatcagaaagcaatcccagtgtcatgtccaaactccaaattctccatcataaacctccaaatttccaaatctagtcaaaattctccggttgtactgccaaaccgacaacagtacaagcctgcattttctgtcatgctgatgtcgtaggactagtcatactgtacctgaagtctgcttctctgtcatcattctgcatcgtacgatccagtgacatgtatacgttgtttgtctgaatagtcatagagaaatcttgagataacggttatgcaactgtttattaattttggatgaagattcacaaacagaattcaataattgtatactccttatctttggttggtagtttttagtttgctttttcttcacggttggtgtcctcttttttatgtgtgaacctttttatttttgagtgttacgctgtaataattggctgtagctcgttgagcaaagccagaatattctattccattatctaaaaaaaagtcatcagagaaatgagttattatagcaagcttttcttttcttttagtatagtccctgtggaaattctgaacaagaactctgaatctctgacaatggtgatcttgaaccagaataattaaggtcagaagataagacaaatatggtattcaaggctttatctgtacattttggacatggctcttgactggctctacgagcttgaaaagtcggagccatatccagatatgccatttgtcgcagagctggagagtactttgttccgttgcttcgaattcacccgttaatcttctgtagatagatgaagccagagagagacagaagctacacaagttctgtaaagctaattaaaagccattgtgaggtatgagtgctgagtacccaatactcatacactgggaggaacaaccggacaagagctctttagtggtgatccagaaaaagtatatcaggatccaataatactaataataatataattatcatgtataagtttgtaattaatatattataggatagatagaaattgatatcttacccagtgtccggtacaataggataagttccggtacaataggataagtacatgaaggtatgcccctctctcagcacggttttattatcttgatgtaattaactgagtttaattaaagtttatatcatcttttaaaaacctagactatggctaaagaggaatctttggactctgaaatttctttgaactgcatgatggcctgtaggctgtaggatgtagtgagcctgtgaatattcagaaattcagaacaatcagagagggtaaactagtattcaactgtggcatcttttttgaacgaactggggcatctttttttgttaggcagggcttgtgtacaccagcaaattttaaatatggctcgggacattaaaatattcttattgcatttttttgccggtttggtaaaaagagaacatgtaaatgtaaagcatatatgcccttcagtgactgccgtacatgacctgaaagcaagtcaatgaggctttatcaacaactaagcctaagggactcacccacagtcttcaacaagatatatttacaaccttaaatcttttcttggaaactaggcagaaattgattaatctttttatcagaaagaaaacgaccacaaaactgtcactccgtatgtctaaattccaaagttatttaggaagagagagatgcgtttcagattcagggtattcttttacttgacccatcagaattgagattttctttctctttaagtggaggcatgggcgacgcaaagattaatagcgacattacattagaagtggggatctactcggccatgattcttggaaccacgaaatctttttgggttttgtttgtttcgtcctagtgtgcctcgacgattttcaattggacgtggatggatgctcactcgaggtcccagaccactttccgggcagccaatcgtcgaccctgcgaaagtcttccacttagaattatcagcgatgcgctttgcacttttatgctctaatgtttgaattatttatgggtaagccatagaaaaatgaagaaaaattgaatgaaacaattaaaagtaatttatcaataggacttttatatctacatgttactagtggtttaaaaggtgcgaggtgctagtggtgacttcgtttctcaagatattgcggcacagtcttccgaagatgctcataagagaagaacatgcatgtgtgttcataggagtaagtgtgtacgcattatagacacatgcgtttgtactatatttaaaaaaggataatgttataaaatgattacgatgaaaaactctgaaatcaattccaaaattaagttaaaaatttaaattttagttacggtagataagctaagaacctgaccatgagagacctcgcctcaacgcaatgcaacgtgtatgagagcaaaaggtaaacctgcggaattcgtagcttgcaatgttttttcaaaaaatatttgaaataattttaacagaataaaaatccataaaaaaatatttcatttttttttaaaaaggaatacttgctggagctcgtcaggcagatgaacctgtacatgatgtttgtcaatctggctgaagcggacgtccgacaagaacagcctgttccaacccacttcgtcccacaaaatgccgccttaacatgtcgcttaacggcacgaacagacgaaccctcacaataactaaaaatatatatataagagaatgtgatagtttacccaactgaacctgccagccaagcagctcattaaccattaccaagaggataaaatgataaaaggcagtgaaaacactgcatttcttgccaacctgcaacgactctggttgtttgctctggttgtttgcaaacagttagctgagaccaaacaccaactgcattatacatgtgctttctgtagtgtacagcaaatatatcaaatgacaggaggatgattattgcccggagaatcaatgcagggtaactcgtctggtaagtaaatgatactgtacagaacaagataaaaaaaaattctggatgtcatccagttcacaatctacaagagtttctgagttcatatatcaaccatggaagtaatgggtaaaactcaggaggtaaaagcacacacactgctgagctcctctaaaaaaacaagaacgcagcgcccaagcatgcgctatgctgtcaggccttcttccaatgtttggctacaccagtacaaaatcatgaactcacccaaatcgccaagcgatcgctcaactaagtcagccaaattgtatcaggtacaaccaatatctcgcatgttgttctccaaaggggcatcatccacgatccccatgcgcatcaggttatgcaagctgcaagtgcctagccactctctctcatgcatcgccctggaagaagataactgtactgatctactttctctagcaaataagcaggaagatgaacggcagaaaatgtgcttgggattggacccagcttggcaatgatttcttggaatgtgtattcttcaggaagcatgtcgaaaagatcggctcctcggcatatcacatgctgaattcttttggggttcaggaagtacttaaatctaatccgatcaacatggctataagcttgcattttgaagacaaaatcactaatgtagcgaaaacaaaagctgcagtgccatcctgaatcagccagaaggtcatctgtttgccggaaatgtgcatacctcgtctttccagcccggtatctgtgaattgaagccctccaacttttgtcatcaaggaaaaattcaaatgagtacagatagttcctgagctggagatggagtacttcaggtatgtcatcacaccatctcaagaggttgatcgtatgcccacttggaatctcatcaacatcagacatgatcaacaggtcatcatctgtgatcccggcaattttaataagctggtcaagagcaaccctctgatatgactcctcgacaaatgggttctcccccttcacaaaccgaccacctatcataccataggtcaaccgtgattcagcaaattcaaaacgttgacggttttccttgaagtggagatcctttttaaggccagtgaaggttgagttggactcaagcaacacaaactctgacacataagggctaagctcatgccaacggatatcaagaatatcaagctcgttgctgaaaagcacagcatcaaaaacacgccgcggcgtttccctgactttccatccatgtaacttgcataagttggccattgagacattttcgttgtagtagtgaggaagtactttgaagggctttgggggcttttcccagattggtctgaggaagtaagtgactttctggccatgaaggtatataacaaagatcagaattggcagaccaatcaagaggatcaaaagtgctcttaaatcaaacccccgaagtgcgcacttcagccttgacatactaaaaactgcctttgaaccatgctgcaaatgaaatcagaagaaagtgagaaatcagatcgtcaactggagccaaaacctgaatagagctaaaagtaaaaaaaggcaatctatgtcgatatccttccacagccatagaaaccccagtgaaatatatataaaaaccacaaagattttcaacaacaacggttacaacacccaggacgttggtttatcaaccactagcacagcaaagcttacaaaagatgcaggttgtatggcagaattgaggattttggcaaagatgcttatgaatgtagtcctatcagagatgacagttacaaacgatgcaggttgtgtatggcagaattgaggattttggcaaagatgcttatgaatatagtcctatcagagatgacagggtggcagtggtactaagcaatggaaagacaataaaacagcataacttagtacgcaggagtacatgaacactttccagtgattcaaggcacagaattgagaaagcaagttaaaaaaaatcaatatcctaagatagcatcaccgcggcataaagcacaagattttccagcatccaccgtgaatttcgcggcagcatccaaaagataatttattttgtttaacaatgttaccgcgtactttaagacaataaagtatagctggagcaaagtactcattaccatgtcggattatttttttaattaaaaaaaaacagcatccctatgaataacatgctaatgcagatccaccaaacaaagaaaaagtggggaatcatctaatcatttatttgcaaaattattttcttccacggcatgaatgatccaaatctggactgccacaaagagagatgatttccagatactttctaccaagaaaaataataaagctccagaattataggctggacagccaattctgccagctcgcgagattctaccggcaccagatgcatccaagcctcgaactccacctaatcccaatctcgagcagatgcccccgattcctcgaaagcaatcaagcaaacctcgcgactaaatcaatcgaaaacctgagctctccgagagaaagctaaagccaccactaatcgagattgagattgaggagcaaatttctttttttctcatagcaaaccaaacgcgataaaaagaaaaatagcagaacaaggcaaggcgccgtcaagaacgggttcgagagagagagaaacacgcggcgcggggagtgaaagcgacagatctgatggcggaaggaggaggaggagggagccgggccgctcacctcgctgtcgcagacgtcctcgcagatgccgtccgtcttcttgcagttgtagtacccgccggcctccatccccgcggcggcggcggcggcggcgaagaagacgagcgaggaggaggaggatcacggggggagcctctcgacgggggggaacgggaaacggctgacgcgctgctcccgcctctctccagcccacgtctcccaatggcaggcggcggcgggagacctcgccggcggcgaggtgggggggaggcggtgcgcgtgcgctccctggtcgtcttctcctggtctttttgcgttctccccctcggactaagcccgtaattaccgcggcctcctcgccgcgtgcggcagtcgggccgtcggggacgtgttccgaaatacggggagtgtgcggggggtgggagcggaagagtgttgttggggttgggttcggtgcgagaagggcgagagggtgggataattggaagcgactagttatagccgtttgtgggtggaggggggggaggctggattgagaggagccggagcgggtcttggtttgtcctcgtgcaaacgggggcatcttccgtcagggttaagcctgcctgtgttatttctcagttttctaactcagctttctcgtttttgaaactgccagaccgtgtattttttattaaaaaaaatctatataaaaattattttaaaaatcatattaacctattttataaaaagctaaaacttaattactcatgcaataatacgtatttcgttttacgtgccctcctcccgaacgcagcctaaatgctttaactttctcattttctgtttcaaactgctatactgtatatttattcgtaaaataatatataaaaattgtcttttaaaaaactaaatatattaacttttaagtttataataattaatatttatttaatcatctggtaatgagttttctagtttcaatattcttctctctcgatgaaacgaatgattaagtcaaggtcttttaagtcatactgtcatcctcttctgaaaatcaccttttatggaactttttgtgactcatctcacgatgaaatagatattttcatcgaggacgatggggagaggatgaagagatacatatcaatattgtatacctacaagtactctctttcggaaacacacaacataccatgcacccacaaacaggcgtctttataaacacacacatgtacaccgaccaacatacttcctccgtcatcttaatactataaatctaaacagcttcctgtcaatatttgtagtattagtatatatctcatctaaccataatctattatattttggagtattttaagattagtgaagtcaccgtagtccatagatgctttgatgtagataggtacgacacctacatatacatatcaccccaagataattgtgccgtacatacataattgtaaaagtttatttaaaacacaagcatatttgcacctacaaccttttccgtaagaatttttttgaggttgcgtagaaataaagcacaatgttgtattcctctgttcactactccctccatcatattttgatcatcccttaagggttttgaggttttcctaaaaatgattatcgtctaacaagtgtttctttgtttatttgtgcaaagattaaatatgcatcatttaatgtgttgcatacaaccaaccaagattaatttctattagtgcaatggcatacgatacttaaaacatgagcaattcacatgatacgaagcgatgaatcaccttaaccaatgagcttaaccaatgaggattaatttgagattaataaatattttgttttccttggtcttagtgtcatttgtttaggggatgatcaaattgaaatggagggttgtgctacacaatctcaaatcctcaataaagcatataatgtcttgaaggaagcacacccttacacataaaactcatctttgttggaaacacaaacgatcaagtgcaatcacaagattatatatttcagttggttaggtttcttatagtacaatatattcacgtgtaagttataaacttaacgatggtgcttgtatatttaattataaaagcatatgatttcatcaaaactcatatcagctcaacctcttagagacgtgttcacaaggctgcgcgcggatatgtatacaagcattgtgattgtaccgtgtttaaaaaaactgcaaccataatcaaccaatcggaagtgtttataaaggtatggcgtgtgaacgtgtagaagaggccggtttctctgacgtaatttttcacctaacatgatcactgacacgtgaccccatgagcgatgggatccacgcattagtgaccacgtccctctaactttatgttagaggatcctaatccatatacgagcgtttatattgtgtgtgaaaaaaaaattgccaaccgtaagaagtattgtacggtgttgtagatgatccattttcgttcaatcgcgtcctaggtggtgccgtgctatgttcgtgggaaatttcagcacttgttagctacattatcgaaaacaaatatacgctttttttttgctttctcaaggaaaaggcgtatgatcggcagtccaaaactatacactaatgagcttgcctgtctttctgtctatctgtctagctaggttggattcgagtatgaacgatgatgaggattgaggagcatatttatgagatgtaactgacaatgagatctctcggcgagacgctttcaattctatactccctccatccctaaatatttgacaccgttgactttttaaaatatgtttgaccgttcgtcttattcaaaaaatttaagcaattattaattcttttcctaccatttaattcattgttaaatatacttttatgtatacatatagttttacatatttcacaaaagtttttgaataagacgaacggtcaaacatgtttaaaaaagtcaacggcgtcaaacatttagggaaggaggtagtattctggtccatgtactccacgctttatgtttctgggtttctctcctccgtttatttttttctcatttggataatatataaagacagttgtgtctgaatcatggcaaaccatgtgctgttagttgtttactaaccatgcaaacttttcattgttaaggaaataaatactttatagacttgaaagtaactaagcatgtagcaatgccaaaaaagtgctagatcctccaaaggaactatgcatagctatacatgcagttaaattggcaaagcctcagagcaggtacaatagcaggctataaaccagctataaccatatatcaagaagaaaaaagaagacagaagaaagcgagctacagatttataaccaactgtaacacggactccaaaacattatatgtgtatgagaggtgggaccgggtattaatgatgtagtatatttttatagctaactattgtatgaataggctattagattagctatatatgatttggagcccgtagttgactatactattaaacttgctctcatgagatcatgtcccccattacaagattaagataattaaacatgccaataaatcaaggaacagacatcgaagtgagcatagcttaactggtagattacttgtggtagaatatgtccatccacgtttaacgtcctaaacttgatacatgtgctcgaatttatggatagttatttttttcaataatagacaacgtacccattaataacaagacgcccatatgtgatgacttcatcaatctcaagatatgttgatccagtctttcgaaggtatacatcgaggtaataggtaatgtgtacgtgcatgggggatcgattataggaataagtgtgcgcatagacaacaatacgtctgtggtgatttcgacaatcttaagatatgtcagctcagtctttcggagacgcttataagggtaggatgtgcgtgcatgcgtatatagcggtgagtgaaatttgtgtttgtacgtaattttttaaaaaaatcagggaaaatcagaattaaacaggtctttcaggcggtcggcagctggattatcaggccaatcaatcaatcaattatcaatccctcttgcggcgcatatcaagttgcagtttttgtgttcgtttctttttttgtttccctgaaaccggagtcgtcaacggctgcttccccttttggttttggatatttttgtttaatttgctttctcttttctgaggcagagaaggggaacggcgaaagtttcgtcaaagcggtctcacacggtacggtacggtgtaacaacttcttcctttactgaatttttacttgaaacaaacacgcatgaaaacgtattttgtcgcctaaaaacgcatcaaattctgtttgcttccgaccgaagcaacgcgcatttgtttgtaccaccgccgttggtcggtaacaaaatctcaggttttaggaccggtcgtatctgttgactactgcaaagtgccaatgtgaccacagaaacagtaccaagcagggcacctagtacgacttatcaaggacctgttcactttgatgctaaaaaaaaccttatcgaattttgatattaccaaaattttggtataattgacaaaattttagcaggatttcttatatagttaccaaaatttgacagcaaactaaatgtagccacttttttggttgaaaatggcatcaaagtaaacaggtcctaactgctactagtagtaagggcctgtttagttcgcgaaatgaaaatttttgtgtgtcacatcgaatgtatgaccggatgttggaagaggtttttagaaacgaatgaaaaaactaatttcataactcacctgaaaaccgcgagacgaatcttttaagcctaattaatccgtcattagcacatatggcttactgtagcacttatggctaatcatggactaattaggtttaaaagattcgtctcgcgatttccttcctaactgtgcaattagtttttcttttaatctatatttaatgcttcatgcatgtgaccaaagattcgatgttaatgtttttgggaaaaacttttggggaactaaacggggccttaagttctagctagagtcatcgtgtgtttttttaaaaaaaatcatatcaatatatttctcaagattattttaactaatgattaattaatcacgtgttgatgtattgttccgttttacgttaagaaaggtgaagttttcaccctctatctccgaacagagtctttgaaagagaggttgggattgaattcttcttacatgaaaaaaagagaagttattagcttttattaatttatattagttattattgtaaacttgaaaatagatttagctttctaaaagaatctccatatataaaaggtttctaaaaaatatcatttagtagttgagaaacatggtcacagaaaatgatggagtacgtaggtcctccaacttaaatttggaactcagctaggcttaaccaccattggaaaaatcaaagctcccactttaggattcagatccggtgcagtttatacttgaaactgcaatttaacaactgcaaacaattttgtcgtttctccgatcaacggtttagatcctatgctacagtaatctgtactacaatatatttttgctaccatgatatgagccgtacagtgtgtgatctagactgtccgattttctttcaatgacacacaatgctacttcttaagttgcagtcaccatttccctgtgtaactagtttcgcagcttatgacccttacccaggttaatttgcctaatttcagaagaggagcactactatgtttgaaaaccgacctaatttaccgtggtcactgtttagtcaattagctatactagggctgaagtttgaaagtttggttgaaattgatacgatatgatagaagagttatgtgtgtatgaaagatttgatatgatggaaagttagaagtttgaaaaaaaaaactttggaactaaacggggcctagagttcgatgggtaaatataataacgggatcagtgtggattaacttaatctttctcagcagcagaatgttttcgacgtgattggccggcgttgatgggtacaatacaattaaaatagtggtacaaactgaaaggagccgttgccctccacatggacttgtaccccctcccacatggagaggcatcaatcaattagctagcttggattatgtatgtacaatgcattgcatgcgtgaccccgggtgttaatacgcgggcggcaaaagtttcggctaagtaccccctacctaaccacgtgatagtgcctcgagtgctccaagtaggaaagcacagaattttatttccttaaaaaacaaactacaaactcacgcccacactatctctataaataccttcaaaatattagaccagtatattttaaaattaacgaagttacaacggacgagtatgtcacctaccaccactataaatacgagttgggaaactatatgggtgatagtttctcaaatagcatcctactagcaacattgatggggaataatcaaatgtgttggtttagaaagtgatacctttgaggttccatgaatcgagtcgatacttcgagcggcctccatcgcccttagatttatcaacattaaaagaacaaatacacataatcagagcagttgatctccccgaattcaatcagtgtcccacgacaaaatcgacaatattcaagagcacaatcaaagaaacaatatacaagaacaaaattgacatccacagatcaacacaaagtctaaaaacgcagctaagacatggtgaagtccgccgtcaaaccgatgcatcgtccaaatccgactgaccccagatccaacgatcgatgagctctaggcggttggatctggtgttcctcgatctccagatggctgccaccactacatgccatcacctcgccgccaagccccttcgtctttcctacaacggcatagggacttccgttgttgagtcgacaagctccccctatccccactgagccgactatctcctccaccgctatgaaaccacatgtgtagcgccttcttccctaacctcaatgagctccaccattgagccgatgccgttgctcctaagcgctttccagcggttgcttcgtcgagggctctggcccaaaatgctccccttcgtgtagatatagctggtcatttccaaaccatatcatcgacgagtttgctggattttaaataatgtaggaggaatgaagtagattggatggaggggatgacgacaacaatggctatgacaagggaagagagggtcgattacgagtttatgatggtgaacaaataatagagagggctccggcaaccaaggggagagggttacggctacaatcgtggcatgcgagagggtggaggcgaccgtgcttgcatcgctcgagaagccgaggggaatatgggataccacatgtgcgttgttggggatccttttcgaaacatcggggatgatacccagtaaatagcatttcgggtgctaaaaagacatacgccaatgataaattcttgacttggttaaagttttattacgcacaccgcgaatattagaatttaaaccatggtgtgtagcctggagcttgagagttcaaactactttgagaatatgtagtgactcataaaatattatttcacggcataacttaattattaaatcctctatcagtgtacttttgaagaggagtgacagaaacaagaaaagcacggaagactcgatttttgtctccttttcttgtgaagtgttaactcctatataaactgattcccgtgaaatttccgtggttgaaaccaaagaattaatgagggtcgcgaagtgagcatagtcaactggttaggttccttgtggtggaaccagcccacccgggttcaaatcctagatttgacacgggtactcgcatttacggctaattattatttcagtggtaggcgacgtacccgtcgacagcgaggcgcctgtggtgacttcgtcaatctcaagaagggtagggtgtgcgtgtgtgcgttcataggggtgagtgtgcgcatgttgtgagcgcctgcgtttgtactgtgtttctcaaaaaaaaaaagaattaatgagggtcgtgtgattccttgatcacattcctgtgtagttgacctcgacaacgcaagtcttacaccttaattcgctaaaagtaaatgcaattttctcagaccacttgtctagtgatgctcggactcgatcaacaccagcagtattaatgacaaagcgtcatgttctgatcagacaggggcacatatatatggctgggtaatacactagctagtactacttccaaaatcggagatacaaattaaaccgttatgtacactagcaatttagcatacataaaatggatcgttttgttattagaatgtgtgcttagcaacaagcatctaactgttaattcagtataattcagagatgagacaagagaagtactccctccatccaaaaaaaaactaaatttctagagtttgatttttgtcccacagaaaaccaatttctaccatcttacttaccttcagctcataaaacgagaagttttattttttaaataccctttacctacctatcatcactattactttttccattgtgagggtcattttgatcatttttactcctcactgaatttgtcttgggatgctaggaattctcttttttgggattgaggaagtagtcatcaaaatctagctattttgcactttttgggcagatcattgatcgagctcagtccgaggcgatcttgaaaggtcagagccttatcgaaacatctaccgtccaatccagatgtcacttgccagttactaccacagaatcaaagtgttgaacagtatattggatgttctactgtttcaatacccaccattatctttgtagaaatatacatatccggtccagaagtaaaagcaacaaaataaaatctgtaagtataaagcaacaaaagcatctctgaactgatcctatcctatccatacaagtcatttgcacacagagctgacgtgttgaacagtgtcttggaagttccatcgcttcaataccaaccatttatttatcttctgtagatatacatatcccagaagtaaaaaaaaaaaagggacagcaaaagttctgtaaataaaactggtgcaagatgtacccatcgtaatactctgtttaatatatgagcagacagaagatcagaggaatctgctgaaccattcaactagggcagctcttatgtcagccaggtcctatatgtatcagtagaagatttagggaatgtttggttgatgcctaacattgccataactaagtttagactagttgtggtatggtggcataaatgtggcttagaaatagttggccataagtgtggcatgcttatctctaattttgagagcatgacatgtggatcccaaagttaagaaagtgtggcataacataattgcggcagcgaaccaaacacatgccttaaaaaactatggcatggctaaagtgtggcgtggcaaagtgtggcaaccaaccaaacagccccttaattatgggtagttcttattcataacagagggcattaagagatgtagtactaagtacagataagcatattcatttgaagtgggagtacatgcttatatagaattttttaaaaagagagagagagagagaagagaatatgcagttaaggaatatgctcgccctacacatgacttggaaaaaagtcacctaggattcctcaacaactatgaatttagctatgtgatcagacacttgtccaaattttaagtgttcttttccaggtcgatctttgtgattgatgatctctcttggctgcctaaccttgacatttccaaagttccaatgtatttaagcccatcaaatcgagatttcagagaagacgcatgtgtcattacgacgcaaagtaatagagacatttggcacgcacgcatgtatgcttttgcctactcaatgctaatatgaaaaatctatagtttgatttggatggaatgagttgttgttgagatcatggttaggaggaagtcctgttgtttctgtcaaactcactaacatcgactcgtgtttatttgacagtcaagtttggaacggcggaatttcaatactagcttttactgcaaaatcgtataatttgcaagctattcttgctaaattctcatgttctgaaacaaagttcatctctgcctctctggtcataaccaatcgattgcatggctattgcctactcgtttcatcagactttcagttcagctcagccacttctttttcttgcgatcaaaaggcgatcaccacagtagcacgcacacacagctagctagtgcagacagatgacaaaaaggagaagaaaaatggacataagagaccactgcaaatcaagattttctccgggtgtgtgtgtgtgtgtggtgcagcggacagaagttcagaccaccgggagagagacgagacgacgacttggaagaagcagattagcagagcaatttgacttgagacaaaggcacggataattcgtctagctaggatctgaatatctcaaatgtgatggacgcagtggtcgccatcatgtgctcatcctccaccggttgccaatgccaaaccacatgtgtgtatgtttggctgagctaccaccagtttgcctatctcccaggacaccttgaagcagatccatctcgactgaccaagaaagatttgatggcaattgacatgacttaaaggatggcaattcgccgcgtgtcagatatccaattctgtagcaatccaaagcgttttttatagtgctgatcacagtatccagaaatatcacttcttcagaagcctgatctttctcttcttctttggtctggtttgttcctcgccaggaaatgtttggctgcttttttttttctgcacaagaatttacttgcaccatgcatgacagaacagggaaactgaaatgactgcaaattggatatcgaatagtgaaatttctcaaaactttgattatctagccactagcagcagacattagacggaccatggatgcaggttctgcaacaaaagctcatcagagtctacacttgacagtcacttggagcttcggaatatccccatagcatcttccatttctgtggcttgaatctggggtgttcatgtcagcagcagagacagtgagtggccattaccactgtttgtggagtgtgtgcacacaccacctccgatggctgaaaaaccgtggacctacacatgattgtgttttcaactctgaaccttttcttgtgtttcgtcagagtttactcaaaaaaacgcttttctcacaggcatcaacggaagtagtacaatttttgtagcggattactgacttttctttttgtcaaaatcaacccgcgttctaaagtgctaattaaggttagttactcctcatttttgttaacacgtcttttaaacagttaaactgtatgtcctgtaaaaaaagtgcttacaaaattaattaaatcgatttttaaaaaaattaataattattatttaactaatcatatactccctccgtcccaaaataaacttttagcactcaggatttgtcctaaaatataacagcatctccaccaacattctattttcaaccaatcacaaccctttaccattcacatttctcacatacatccactacttattcaatcacaacccttcactactcatttctacctattttcttaataaccgtgtctaattatagaacttcttatattttaagacgaatggagtactaaatatatttctcgtttaacgtgcgactaattagccaaaaacctaatacatcctattttttcgcttatacttataagctaaaatttgaattttcaaccttaaaatttaagttaattttgggatttttttcatcgtagtttatttttcagattttgctttaaaattatttagaatacatgcataaaaattttattaataaattattttttatttgcaaatatgttgtgcttgttccggctcaatcttgaataagccaaacggcgtacactaatccgaaaagaacgcgccaagtgggacatccatgcgagcgcaaacgagaggctgacgcgcgcgcgcgcgcggggcggcgggcatgaagggctcggcggcggcgggcggcgaggacgacgtggagctgctcaaggcggtggcgcaggcgtggcacgcgcagtcgggcaacccgcgcgcggtggcgtcggcggcggcgcaaggggcggacgacgacggcggcggcggcggcgtctcttcctcgggcacgcgccgcgcgggagtgggaggcccgggacggcgcaggccgtcacggttcaagctggaggccgcggcgatccgtgaccgggacacgcgcggcggcggcggcggcgagagggcgtgggacttcgcgcagtcgctgtgggacacgtacgagctcgtcgccgtggcgcggaggctcgagtccggcctcgtcctcgccgaccaccatcccggcgccgccgccgcccaggagcgcgccgccaccacgcgggaaggaggaggaggaggaggaggggtgaagcgagcgagggagagcagccgcagcctgaggagcatattcctccggtcatcgtggtcatcgtccaggaggttcgacgaaccacgcagctagtgctctctcttcctccccattatattgacgtgcaatccttttccgcaatcgtgaaaaaaaaaatctgttctccccattaacaggtgtaaagctctcccaaacacagatcttctccattgttttttcagatagagaatcatcgaacaatcaaatcataagcataattcaagatgccttgttgcagaaagcacctctacttcatccattcagtcagaaaatggtaacagaaacagaaattcttagatagggatacatcatctgagctcctccagtggatttggggtgaagtgcaccatcagaaggactgaagggggatcagctgcttgcgcgacgacgacggtagccgctccaccgcttgtctgaatcacgctcaccgcatcagtcgcggcgccgccgcgaccataagctgcctggtagccatgatagttggagtagacattctgaacatacccagcagggtagggatgatagttgtagatggcattttctgatcatagccagcatggtggtatgcaggattgttggagatggcattctgatcatgatcatcagggtaggcaggattcttgtagatggcattctgatcataacctgcagatggttagccagcattcccatgagcctgctggtaagacatagggttggcatatgcataaggtggagcacaatatggcccagcatgagctccttgctgataggatgcagctgcaggaagataaggcacagcttgagctctttgctgataagtgataaccgtcagagtggttgttacatgaagctgcaaaaggggttatacatgctggtgcagcttgagcttgtggcatgatgccactggcatcccagattgacctattggtgcttgtgccgctgttagccatattgcatctgcttgttcaagaaccaaagtatgaaatatgttagaatcatggtgttatctgctaagggaacatcttaagagtggggctcaatgaattgatgaccaattgttaacagaacatattctcaaaacacacactcacaaactgacacactagcactgacacacaaacactaatacacatcaactgtgacacattttaaggggatgcaaattggcaaatattactaggacagaagaaggaaatattatagtaacaatctccaaactgtagctagatcaaactttgcaatgggagatactccaggcaagctgaaaaagtgaaaatggcagttggacataagcaggttgaaaagaattgtacgatgctggcaaggaatgtttcttgccattcactagttctgcaccagagtataacttgcaacatgctaagattgtaactcaagcatgtaaacttacacaaactagactaaaaatgccaaccattaaagacatcatcgtcaagacacttgatttggtcctagtcacgaacttgtccggagataaggatctcttcctaggcacttcctgttgctcgcagccgcagctcatcttcttcgttgattcctctccttttcttttgctctcttaaatcttcagctggtatatctcaccaaatgcatttttgtacgatggatgcataccttggaatatttcatttttagaacatgcatttaacaaagtgtaatagttgttctcagtaagctctatttgtaacttatgctatatgtgtagtcattcaatcaaatcatagtctcagaattgaactcatgctgcattgctgccacaattttcaagcacagttgttttatcagttaatcatacaacgatacaatatatttcattacaaactcaaaagatagaaagataagtagggtgataataagattatgtgccaagtgacaatatgttcagattcaatgagaagtaatatcgacaaccaaaagaactagttttacctgcacataatgatctaagagaagagaaaccagcaatcattatcaagcacaaaataaccaccagacatttcagtgccaaggtcgttaaaagcatgaaatacaacactacaatacaaacaataggttatagcttcattttacaactaatcttactgatttatctcacttcatttcacctgcttcacccattatacctcacaaatgcatcttgatacttgatatgacggatatctacctactatatttgtttgcacaacatgcacttcacttaatgtggacatatcttttttagcaagcctaaggaattccactttaactgagcgtcaacactgcagtctaacagcaacaattttaacaaatgaaaaataagggtataattttacttggaatatgtagggacaaaaattgaaatatgcaggcttggttgtaatcgaattgcaattatattcaggcatcagagaactaaccacaacctgcatgttaactttctataaagaatgttggcattttcctaacaaaaagcaccataaattgcacttgtttgtcaaaacaaaatattcatatggtcatacctgcagaacagccaatgcaaagtggcagatgatgtcaccagttcagagatcagcttgatgtcttcaaattttcaacaaaggaacaatacaacaagaaacagagatgtcacgggaagaatttgaaggagaattgattttttggtggtcggcacttggcaggaagccgacacatcctctgagacaacaaatattaagaagactatatgagctctcctttggacagtatactggcttcacaattcctcttcctccaatccaagtagagcaaaaataatcagagattcagtaaactgagatggtactctgtagatgccatggtgccaactgcattcaaagttatggtatgaaacactaatttctccacaaactggcataacttaactgtacaatagtagcaatatcctggataagaatttgagttttcaacttgtctacacagcaagttgtatttggaaggtgcaaaaataaatttatgccaatattgtgctgaactccaagaagtaaaagatcatcatttttgaaaagcacgaatttcatataagcaaacaaggcacaacagctcttccatacatagctacaattccaacagttctgatggcatcccacagaaaaataaattaacatctcaactcaagataccctaattaaattaaattagttacaacatgctgatttgcccccatccttagtacaacagcggccgtctcagccattctacagcattcacatatgagcctaatttcagccaccaaattagatgaccacaataacgcaaattatctaggtaagccgtaagcatagaaagcaccaatagagtaggtgggatgcctaattggtaccagagacaggcttctcgccggggctgcacaaggagctcatgacctcccgtggatcgccacatactggcagctcggcggggctgcacaaggagttcatgagctcccgtggatcgccccataccggcaggtcggtgacggcatccaccaaggctgcctcgtgcgcgtggcagaactcatcgatctcgtcgcacacctccgtcaaccgcttgagcaactgctccgtcacctccgcctgcaatggccaccacccccacaaatggatagtgaacaataagtctttataagtacatcaacataccatactaacattcttacttgatgatctacagtggggattagaggattaggaaaaacatgttaaaaaatttgcaacctagccagttggcaaaaacatgctgtaacagtttcatatcaagggttctcagtttcatttttatttttatttaagagcaagggttttcaagattctgggaggtgaggaatgggcgagttgttacggtgagttacctgggcgaggaggccgtcgatgacggtgaggtcggaggaggaggaggaggagccgggaggcggcgaggcggcgacggggtcggaaggcggtcggggaggaaggtccgcggccggcgcggcggggagcggcgcgaggacgtccgaggagagcgactcccagcgggagagctcgtcgaggtacctggcgcggagccggaggagcgcctggcggcggcggcggcggagtacggcctcgggtggcggccccggggcggaggaggtcgcggcggtggcggcggcgtcctcgaggtcgggcgggtggaggacccggcggcgcttgtagacgaagccgtcgcagttgcagatctcccagtcctcgtcgccgtcggcggcggccatccgtgcgcgtgtagacggcggcggcgggggagcgcgcgtgtgggtgagggaggaagggatttcgatttgggtttcgggtttttttttttttggttttttcggggggtttagatttgggagagatgcagattcgaattcggaatcgtggccgcggctcggcggggcgcgtgcgtgcgtgcgtgtcggctgcgctgaaaaaaaaaatcagctaatctgatggagtgatggtacaggttgcgcggccagtgtcttcactctctagttcaattccgcgctcgatcccgggttggggacggacacatcctagccctcgatacccgccgcggggctcgatccaacggcggaaaacacacgcgcctgccatgacgccacgctcctttccgcctgataaaagcacggcccgatttggcacgaagcacgctgggccgtgccgtgctagcccggcacggcccaagtcccagctctactgccgtccgtcaggccgtagagcgtagtgctggccgaacgggcggccggccgagcacggcacgggcatgccggtggcacggctcctgtagcgggccgggccgtgctgcacgggcccaaatatagcacgtaggctggtgtaggcccattagcacgtttgcctcacagaatttgaatatgaagccgaaaataaataaaaaatgtgaaaagaagatgaaaaggtgaaatttgtgaaaatattagaaaaaatgacgaaaagtagtgggaaatagaaaataacttctaggtcggttacaggtgaagccaattgctgctacttgatctcctgaagaaagcgagcggtagttcagtctccgacaagtgaggccgaactactactactgctccttcttacttatttccgttttttgaaaaattgggaggaaatgagaaaagtgagagaaaatagacataatatatgaaacaacatctggatcgtgcatcttgacttattccttccttgaggaaccaaaaggccatagcgctggagctcagccatggcggcgacaaggtcactctcgaggaggcagccaagggaggtggaggtcacgacaatggcggtggcgggggacggaggctgagtcgcacccttctgctactggcaacggtggtcaccagaggactagggaaaacaaagagggggtggaggccgaactagaccctgcctccatcggcagcgatggccgtcgtcctcgacggggagaccagtgctcaatagggagttgcaggcttaaagtggctgatgggaggagactgaggaagaagacgagaacaatatagtctacacattttgttcgatgtatcgatggggtatgcagtggcatttttttttgatacgccaacagttataatggcatgactacaaataagtaaatattaattgtacattttaaaactgaagaatttataattgtatagattaattaccttatttaagggtattaaacctatttttcagtttgtttggtttgaggacaaataagatgggatgatccatgacacagaatattcccctaagaccaagatcaagttagcctagtcccttagaaattggcggaccaattcaacctattatttttctcactgacacgtggagaaaattccaattctaaaaataaatctaaacatacaccatattcaaattaatctttatttttgggacagaacgagtagcgtattcaaattaatcttcaggactgaaattttttgggactgaacgagtagcaagaagagaccattaacgggcagatcgtcagcaacatctttaggctgaggcttgtttatttcctaaaacaaaaacttttcacccatcatatcgattgtttgcacacatgcatggagtattaaatgtggaaaaaaaaacctattacacagtttgcgtgtaaattgtgagacgaatcttttaagcctaattgtgccatgatttgacaatgtggtgctacagtaaacatttgctaatgacagattaattaggcttaataaagtcgtctcgcggtttcctagcggaatctgtaacttgtttttgttattagataatgtttaatatactttaaatgtgcgtccgtatgtatgtccgtatattcgatgtgataaactgataccccaaaacaaaaatttatggtaactaaaccgggcctgaatgtttctgcggggagacatgagagacataaatcgacgttatgcggcgtatggagaattggagatcaccggtttgcatatatcaaaggccggcaaaaacttacatgcatcgatgtgccatccctaaacagtgtcagtgaaaaatggatgtttagtttacagtttgcaagaatcgagcgttcacaaatctttgcacctcgccaccacacagctgcaacaaggtattaataattaattgtcacatggatcaagagcaataagcagttaagcacccagcacagatggtgactcggtgaccaaggtctcaaaattccagaacataaaccaaaccaagcagcgcggcatcttacgatcttcaagaaagctatgaaagcagctcgggagcaaacaataggaaatacagttgatccagggttcaccaagctgttctgggtagggttaccgccacctcacgatttgactggtgcaattactgcgagatataccattatttccacacggtttggtaaaccctggtatgatcacttcatagaaacaatcgaacatcagaccaaaacacttcagagaaacaatcgatcattgggaccaacccgaaattcagctcgtcgttttacaatcactgctccctgcttgtttcagtccaaagagattttgaattttgatgggtggattttttccccctctcttctcagcaatcatcaaaacagataataacaatcaatgaaattcacaaagagaacacctaaaattaatcctaagataatttcaagcaggcaatcagcaatgcatggaacacagaaaatcagcaacgaacctgcacccaacatcattcataccaacataattgctggattgaccatacttaaaatctcatgctaaagcattagtacaaaatctcgttgcgcaatgtaaaaactagtaagctgcactgtaacatgggtatcacagataacaaaaggatttgtttggtaaggcgatcttcagttgtctaggccgggcacctgcatgcggcggttggcgtccgacttcttgccgccgaggaactcgtcggggacgaccttgagctgcttccgcttcttggacttggcgatcttctggatggtcttggggttggtgacccgctgcagcttggtgcccgagcggagcacgttctccttcttgcgcttctcccgctcctcccgctgcttccgcttcgccgccttgctctgccggatctcctccttgagctccgccacgcgggcctggtacgcgcgcttcagggacttgtcgcgggcgcgctgctccagcggggtcggcttccgggacgccgccagcgcggaggcgcggcgggtgcgggcctccttccagcgccgcccggagacgcgcccggcgatgacgccgtcgtaggtgggctgcccgaaggaggcgggcttggaggggtcggacagggagggcaccgcgcggagcttggacggcctcggcgcgtcggcgtcggcgtcgaggtccatggagtcggcggcggccgcctcctccgcctcgcggcgcttgcgcttcccgcgctcgccgccgaggccctcgtcgaggtagcggaagtcgaggtgggacgccatgggggggatgggagaatcgggaagctagggtcgccgccgcctcgggtcggggaggaagagaggttggaggcgagcgaaggggagaagttttattagggtttgcatcacaagaggcggcgggccatatgggccagcttgcaaatatttgggccaggccagcttagcgcggccttgtttctttttttttccttttatgtactatttccgccaataatgtgagaataaatcctcttttacattgcaaaatttagactccataccgcaaaaacaagtcattttagacttttttgtcaacattatacaattttttactaccttttaacataaattttaaaagttacatatttatacatccaaaatccatattttgaataatttttattgttaaagtaaactcatgttcactacatgcattttaaacttattattttgagaccagaacgagttcttagaatatataacaagaattagtattttgccagttaactgcaacacaactctttctacaaggaaatcaggcagacattatcattatagtaaagatcagaatatgtaataataagtagaagtaatcaacgcaatagtgttacagttaagagaatcgttctctcttatttccagttaagaccgcaaaaacattgcgttaaaaatcgatcctggattcctggtgatttgctccatcattccgaagcaaaatccaccagacacaagacacctgaagattgtacaaggctgtgacgaacgaaatgatgatctaacgctataagaaacgaaaatcagtcgggactagacacctagtccaaagggaaaattttgtttcaaaagaacgcagccggccagcaattaatcaagatgcgcgatcactgcatccgtgacttcctgcgtggtgctgctgccgcccaagtctttggttctgtacttgccttctgcgatgacacgcttcaccgccgtctccagccggtcagcgaatgatgggaattgcaaatgccgcaacatcatggcagatgagaggagcagagcaacggggttagctttcttctgctccacaactttgacgtttccaacatttcctgcagaagctccttgctcgaagacagcatggtcctgacccacattacctaaaatttgtgcatttcatgaggattgtatgtatttgttttttgcatatgcacaaatatgaaatatgcacaagttgagagttaacacatttgtaagaggttctggcagcatacaaaattgagtgggtccaagaaagtgtataaaatgcaacacaaaatatcacacaacacatagcctgtaactaacagacaactgcaaaagcaagcctgtcggtttccagctcctgatagccgtattgactatttgtgcaggtaaaagtacagaattacaagcgatagttcaaaatttacctccaggcatgacaccagtgcctccagcaatacctgcagccgtgttagccaccagattgccataaagatttggcgtgacctacaaacacacaaaacaagagcatgctaaatcaaaagttcctagttaatcaaacaaacttgatctgaaaactctgtgacaatcaagaaaacatccttcagacagaagtgcaaagggaattaatattctatcacattcattgcagataatctactaagtactctgataatgtgcatttgatcaatatatgtaaacatcaagcagaaactaaaaactttactttgtttttgtttttatgacatgataaaagcatagatcagtaggtgagtatagaatatggtgacgttacaaacagaatgcatttgttaagatgcatagtaatgatagaactaacatacttaccataacatcaaattgttcaggcttagcaacaagctgcatacaacagttgtccacgatgatttcattatattgaattccaggatactttgttgcaacctcacggcaagactccaagaataaaccatcagcaagcttcatgatgtttgctttatgcacggcagtcactttctttctgttgttgaggtacgcgtactcaaaagcatacttggcaatcctttcagagcagaactttgtgatcacctagtaaatccatttagtaacagtaccatatagaaaaaaattcctttagatgatgaaatgaaaagtgacaaaaacatttacatacgttctatttcagaaatcggtactcacgcaaatttgcaaaataggagtataaaagaatatgtgcagtaaaggactgcctgccaagacctaatcagctagagtgccatcaacaggccatttatggaggcaaaagtgttaaaaatataactaattgactcagatcaccatggactagtgaccagattagcaatatcagatataaactatgtagatatacatcatgcgtcaatataacatgtatcaagtattaaactgtttacacattcaggtcaattgttaatgctaacgcataccatagcatctgttccaacaatataggatctaaccaacatcaagagccgtttgaaatcaaagcactgctcctaatgtgcagctagcaaccaaaacttcaactgtgagatccattcacctaagaaaattgtcacaggacccaaaaggaacttgtttcctcttcaaatcagaactacaccaatgatagttaacctaataattttatagctttctcaaaggatggataattggataccgcaagttatcagattatttttatgcttcatttggtgcttattagcataagtccttctggatcatctcagagatttatcaatttctacacaggtgattacataaattttgtaaaactgacttaatttgaggatattttgaagcccatccatcgaaatctgtattgaatagtccacataattcgatcataaccactatctcaactacagcaagcatgcttcattgcaacaaacaacttaccagttacatatgcctaaagtgttttatgcacaacccagcaatacatggatctcgaatactcattatgcaaaccactaacatctcagaaaagcgtcaatacacatggtaagtttcatcaattcaactgaatactaaggttactagatgtggacaataaacctaccaatccagtaaagtaacaagcagtaggtaaaacaaacagtcctaagtatatagacgaaattgctcgataagtggcaaacctaagttgcatttggggttctctcggcacacgcattaacccaagcaccctggcaaacactacatcaactaggtgagttagcagcaagcggaattcgccataccttaaggctctccacgacgccagggacgacctcgtgctcaagcccggagtactcgccctcggtgttctccctgatgacgacaatgtcgacgttgtcgtgcctggtgggcagccccgggaggttgaagcagttgacgagggaggcgtagaggtcgagctccttgcggagctgcacgttgagggaggagacacccccgccgactggggtggcgaggccgcccttgaggcagaccttgttgcggcggatggagtcgatgacctcggggggaaccgtcggcatgtcgccgcggacctcgtaggactcgaagtagaccggcgcgtgcatggcctccatcacctgccgcacggcgccggtgacgaggggcccgatgccgtcgcccgggatgagcgtgacggcgcgcggggcgccgtcccccggccgcggcatgtaggtgacggtgcggcgggagacggcggcggcggcgagaggatggggcggggagggggagggggagggagtgggggagaggaggcgctggaggagaggggcggatcgccgcgccatggccgccgcgtctagggtttggaggcggatgcgatcggtcttcgaggagagactccaaaagcgggggtattggggaggaagagagagggaatgggttttctcgtttatttttaagtaccatatttagaaaaaaaaataaatttgcaattagagtcaatttcgtaaagaaaaacaaactttattgtaccaaactgtaaatggaggattaatcatgaattatagatatagtatttggcatgtactctattttaagtttttaagttaacacttaattaatcatgcgataatgagttgctctaatttacgtgcgcagaaagagagttatacagatccataaaatccgaagacacacatggagactacttgccctacagtgggtgtgaacgaggccacgtcgtggcctaatggccttgtagactaatagctacaagtgggttaaatgacattgctacccttatgttttctattgtgacttatcgcctcctctcacgactcatcttttccatccctcctctcgcaatttctatcctcgcctcgtgatgctccgtgtgttgccagtcctcgccgtcaagagtactgaagatgaagctccgcagtggctacgagtatgaaaggagttggttgtggtgccgccaccgtcgagacctagggcgtcgccgctttccccaacggagatgcgggatgtgatcatggtcccgggaccgacggctccaccaccggtaactctagcgccaccgccaccgctccagccccaacgtcagttgctgcaccaccgaaagctgtagatttgaatagtacctagggtttgctggtgagttgagaatcttgtagatgtagaaattaggtgatgatttcgtgttttggtcctgtatttatgttggaaaactttaattttgttgcttcctttattggctactcctagccatggtgggatggcaatgagggaagggatggtgaggacaggcacatgatgggaaaaatggcagccgacgcgtgcgcgagaggatggctgagggcgatttgggaagtggggaccgagctcgtgggtggaggattacacagcgaggtcacgacccccacaacgcactgttctttgtcgctccacactccactctccctgaatcagattgaggaacacgttaccaagtttggtattgcggacttcaagtggatgcggtagaagctaacgtggtgcccaatatttgttaggggaacggttaagcccaatgcactaacatcacctctttttactatcttgaaataacaacgctcgttgcacgggaacacggcaccatcaccgtcactcttcccgcttcacagtcgacatcaccccccttaacatccgcgggaatggaacgaccagggccgcgcggttttacgtgcaccggcagaagagagcgccaccaaacaaaacagacaacgcgaaaagagaggttggcgttccgggtgacgaggccaaacctgggcctcaaccccattttttctggcccaaacgccgcaaaaccaccgagatttcccgtcatttttcacctcccccacaacgacgacacaggcacacgcctccgcgagacccaacccccgggccgcccagcgcctcacgatttcgccgcacctcccctaatccgtggccctccccttatccctctcttctagataagcaagcgcaaacccctctccgctctcccctatccatccccaaatccgaaccctcccccccccccccactcctctgcgcctccctcctccgcggcctccgccatggcctccctcgcctccgcctccgcatccacctccctggtcttctccacctcctcctccaagccgcgcctcggctcctccgtcggattctcctcgcccgcgcggttccggcgcacggcggcggcggcggcgtccaggggcacggggcggcgcgcggggctgctggtagtgcgcgcggcgagggggaagttcgagcggaccaagccgcacgtcaacatcggcaccatcggccacgtcgaccacgggaagactacgctgacggcggcgctcaccatggtgctcgcctccgtgggcgggagcgcccccaagaagtacgacgagatcgacgcggcgcccgaggagcgcgcccgcggcatcaccatcaacaccgccaccgtcgagtacgagaccgagacccgccactacgcccacgtcgactgccccggccacgccgactacgtcaagaacatgattaccggcgccgcgcagatggacggcgccatcctcgtcgtctccggcgccgacgggcccatgccgcagaccaaggagcacatcctgctcgccaagcaggtcggtgtccccaagattgttgtcttcctcaacaagaaggaccaggtcgacgacgaggagctgctccagctcgtcgagctcgaggtccgcgaattgctctcctcctacgagtacgatggcgacgaagtgcccatcgtcgctggctccgcgctcaaggcgctcgagaacctcatggccaaccctgccattaagcgcggcgatgatgagtgggtggacgggatcttctcgttgattgattccgtggataactacatccctgtcccacagcgccagaccgacctcccgttcttgcttgctgttgaggatgtgttctccatcaccggtcgtggtaccgttgccactggccgtattgagcgtggcaccgtcaaggttggggacacggtcgatatcgtcggtatccgggagactcgcaactgcacggtgactggtgttgagatgttccagaagaccatggatgatgcgatggctggggacaatgtcggcctgcttctccgaggtatgcagaaggatgatatcgagagaggcatggtgcttgcgaagcctgcttccatcacgccacacaccaagtttgatgcggttgtgtatgtcctgaagaaggacgagggtggacggcactcaccgtttttccctggttaccgccctcagttctacatgcggactaccgatgtgacggggaatgtcacaaagattatgaacgacaaggacgaggaggcgaagatgtgcatgcctggtgaccgtgtcaagatggttgtggagctcatccagcccgtcgcttgtgagcagggaatgaggtttgccatccgtgagggtggaaagaccgtcggtgccggcgtcatcaatacgatcttgaagtaaactggatggagcatatccaccgtgagaattttccttgtttactctttgcgaaatgctctgtagttgttattacgcgttgagttttaggggttgctcatgtgaaattgtagtatggcacttttctcttcaagtgaatttgcatactttgtgatattcacgacaaagatacatctgtttgcaactaatttggctatgcagtgccatctactgtcatgtgttcaattgttcatctattgagcttgatgccacatggaattgtagagttacacatgtacggatgtagtacatttcttgcttcagattatataagctatcagcctagcatcatctgtgatgtggtttgcttgcttgacaaacctatcttgatgctagttctgatgcttacatatatatcaatttcattatcttctttttctttggggaactaatattaattatctgttggttaacaaattggtgcgtccaagtgattgttctttatgtgccatttataatgaggttgcttaattgcctattggaattaggtgtatgcaatttgagctgtttgagatgattgtctcagtctatgcacccaaccatactaattctttctttgcatttgttgtaccacatttacatgcagtatttagctttcatgaatctgccagtacttgtgtagttgtgttttcttgggtgctctgacatgtaattgttttcttcacccttttgtgctgggctaatagtgctaactcatttagctccctgttgttatcttcgaataatttagtgcattaacctcttatgggcttcaagtgtctgcagcatgagcatgaactccattagctgcacccaacctctataataggtgtgtgtggctctgaagctggtgctggtctaacattgtggagaagatcaccagttcagtacttcagtaggcatataagctgtgaatttctttcagagatgctcaagcaacaaatactggccttctgggagagatgtcctgagaaccacatatgttggaaaattgaaagttggcaaaaaaggatcagttatttgtacataggaatagtgctgttttagtaactttaatgtgagggttttttttggctttgtttgagctttttgcattactttttaagcggtaacatcagctttccaaaaacatgtgttttctctgatcataaatattcagttgacgtgtaggataagatttggtaaattttgaaactttgataattaataatgtctcacatgcttagttaaaaaaaagagagatggtatacgtatatttacctaaaaagtatagattttataaactttttaatgtaaaattaatggttaaaagttttaaaaattttattctaaatgtcagatatttatgatcgaatgcagcacattttcgtagctaaaaacaagtattttcagttataacagcattctgttatgcaaacttcattaacttgaaaagtacctaaaaatgttgtcttttctccatccattgagcaggtatgatatccatcactaggacatgaaggtttcctcttttcttttcttcttttttcttttttacaggaaccaggacaagaaggttaactccaacgactacaagttcgtctctctgcagttgtctgagcagccttttcccgttttctctaatccattctgagtttctgacggctagcatctcttgtgtttctgtgtatgatgtgagcttgctttgcaggggatctcattcccttcctcttgcaactctgaaagggccaacgaaattctaaactaagcctctgacctgcttgggcatattccagataattagaatcgaacagtgtacatttctctcttgtaaaactcatattgttcgagaaaaattggctgcacatttactggaggattatcccaagcatcggtagtatttatttgattccgtggacggcaaagtcaggtcctccattaaaaaagatcaaaaaggcagaaatttccgtggactttctgctgaaggatgaaaaaaaaggcacctttgtaggaaaaaaaagaggagagatctcttgtgaaaaaaatgaagcaagaaaaggagaaagggacagaggagagcctctgaacgaagaagtgaactcgttggtgagccgaggagtgagatggtcgcccacagaatttccacgtgtctcacggtcagccgttgctgccgctgtcaccggaaagctacggattttctggcccccggcgccggcggccgtgctgatgcgatgcgtgcatgtctgtcaggcaaataggcaatcggccatgggcactgggaaaaatgttgagggcccatttgatttgtaaagaaaacatagaaattctagattattttaattctatagaaaaaaaatcctatgaacaccttagaaacaaatgattgaatcccatcacattctttaaaattcatgaacaattctatatagatgttagaaaaaaaaacttaacagtagcagtagcactgctcatgaagaatctacaggctattttcgttttcgttcagcatcatcccacgcgcaccaccccccccccccccccccacacacacacaccgaacaacttgagaactcaaagcccacccaccgcgtcacggctcacggcacggcacggcacgctctccaccccgcacgctgcacgcattcgcagcgagcgacgcagccaaaagccaagacagccaccgcgccgcgcgagccacgcccacgcacgctttcacccacccacccaccaccaccaccacccggggctccgctcgcctcgtctcgtccccgtctcgtctcgtctcgtctcctctccgcatcggcatcgccaacccaaccgcctcctcctccgcctccccgccatcattcctccttcaccctagccgagcgccaaaccctagatctcgtccccgccaccgccatgtccaaggcctggggcggcctcggcggcgccggcgcgtgggcgctggacgccgagcgcgccgaggaggaggagcgggagagcgccgccgcacccgccccggccgcggggttccccagcctccgcgaggccgccgcgggtgcggccgccggcaagtccaagaagaagaaggggaccaccctctcgctctccgagttcaccacctacggcgccgccgccgggaggcggcccgccgccgcggccgcggagcccaaggggctcacgccgcaggagatgatgatgctgcccaccgggccgcgggagcggtccacggaggagctcgatcggtcccgcctcggcggcgggttccgctcctacggctccggggagcgccgcggcgggttcgacgacgacggccgccgcggcggccccgggagggacgcggatctcgacatgccgtcgcgcgccgacgagtcgggcaactggtcgctcaacaagaagtcgttcacgccgtcgcccgccgactcgggcgcccggagcaggtacggatccctcgggggcggcggcggcggcgcccccgccgcttcctccttcggccgcgccgacgacgacagcgactggtcgcgcgggaagaagccgatgccaatgccgtcccgctacccgagcctcggctccggtggcggtggcggtggcttccgcgactcgcctacctcgaccgactccgaccgatggtcccgtgccgctcctctgcctccgcacaatggcgagcgtgagcggccacgcctagtgcttgatccgcccaagcgggatgcctcggctacccctacgccgcctcctgccgaggcggcacgcagccggccaagcccatttggcgccgcgaggccccgcgaggacattcttgctgaaaaagggctggactggaggaagatggagacagagattgatcataagactagccgcccaaccagctcacagtctagtaggccaggaagtgcgcattcgtctcttcctgggagccctggatcacagacatcagctgtgggtagtgaaggtgtgccgagggctcggccgaaggttaatccttttggggatgcgaagccaagagaggtagttcttcaggagaaaggcaaggattggagaaagattgatcttgagttggagcatcgtcgaattgataggtatgccataaatggatttgcctctttataacaaagtttaccttttatagtatgcacaactgtgcaattagcatttgtctttgaatgcaatactgatcaaaacaattgaatctttgggcctgtgaccttaacaattatagagtgtgtttagccatgacctttggctgctttatgcttgtgagttgtggtggtgcttaagtgaaatagctttttgcagaagcatttcggcagcaccttgcaatagttcaagtcagccagacattagttctaattcagctatgcactcttaagtagtttctatgcttctttaagcaaattaattttgcacagtgtttacgaaataagcgtggcattttttttttgtgcttgctggttatttcaatggttatataacaatgagcagttgtatgaattgaacggatataccttttttctttttttgctttgctttgagagattatgagaactgcatttacagcaataactagttatggtcttatggatagtaactataatgggaaacttgtattttttttcattaccttttccatttaaatgtcttcttattagtccatatactcccattgtaagaacctgggaggaaaaacttttattcctaatgaaaactggttgggacctgtgcatgcatttcctatttatatattaaccttttaaaggacatggtcaaattacaaaaaccataaagattccaagtatatgtaaatattaatattcaactgttagttatgccatctttttatattgcatatacaataccacactgtgctatttcgtcacatttggttgattaattggaatgcacgtaacaaactttaactcaatagtttatggaaatttcacttttagtagtttttttttggtgcgtgaatgtatagggtttgttcaacagtattctgttcaattattatggtaatctatactctattactaccatcgtgcattttactttaaaaatatagattcaatgatttatagttattgatgaagatgacaattgcttctggctttctgcaacgttttcctttcttactactttcacactatagcaaattgctcttgcttgcgtaactctgcgttttgaaatgtgtagtggtgttagtttattgaattacctcattggtcacccacttgctcatgcttgacactttgaatggttatggttgttacttgtcagaagcctgacagtttttaacctgtttgtgtcatgcatcaacaatcttgagtgaaatctctgtacaatggaaaagctatcgaccgtcaatagatatgttaaataaaataaatttcatctatgttcttgtgtatgttaattcctccagcattatctctaccttgttgtgtttttcacgaattttcaaatttactttcgaaatgttccagatctgtgtgaccaataattgttacctgccaggtgctgagattactgtggaactgaaattgtaatttctgaaccacccaagccctgatttgtaacaatacttgaactgtctttggtcctaatatgctatcatgtaggataatttatcacctctaccagatatatgtaactactaggaaagactagcaagatcatcggtaaactttttgaaccagcttttctttttgtggaaatttgtagcatgataatagaatattctggtggttcctggttatcaaatactttgactgttcatgcatgtttgcctttctttttaaccaatgccaatattctggtcgttgaagcatgcatgttcctatagtttgtcgtttcaactttcatatggtttgggcctttggggaatgattttcttcctgtctttatgctcagttcctggttcctacagtcaattgctttagcccttgccttgtggtttggacctatttacgtccctcgttccaataaccaatcaataattgctggtcatgcccaattgcaaaattaatcaattttacatttcaatagttatattgtgtagttttgatgttttaaaaatcgctggtcctactgaaatttactcgtgtaattttattgttttaaacatttgttcatggacttgaatgttgcagaccggagacaaacgaagagaaggatttgaaagaacagattaacctgcttagggtggatttgaaagaaactgaagcaaacataagtgacgaggataaaaaaggtttatcagaaaagttatcccagatggaaagggaactggagcgtcttacagttgagttggacaacaaggttcgatttgggcaaagacctggttctggatctggcaaggttactgcacatttaagtaattcaccagacgaatcacagattacagagtcaatggaacaaccacgttcccgtagcagcatagaccaaaatcctaaaccagcagaagaaaggtgggggtttcagggcaacagggacagaggctcatttggtggtaacagaaatacagacaggtttgtttgttcctactgtccatgatgcttattagcataaatccaactgaacgcgattaacattgatcacagtaactttgtcctgtattactagacatatctgtcaagtttagatcatttattaattttcagcagatggtagatgtgaactctttgtctacctgcttttcaggtcgttaacagggcagagatggtgaactcttctgccatccatggttttggccttttgagcacttctatcctcggacagatctttttttttcttcttttcctattttaaacaatgaacaaataagttgtcgcgttcttgttgctgcttgactcccattttgtttgccttggaagagtggaggggataatggaatacctcgcaggctcgctcaagggcccaagctattgtcacctccatggtgatgcttctgtttccttttatttttcctcttaattcccctttgcccctctcttccatgtcaaaacagtttgttaccaaactttaatacactaactattgttcttgctatttgcacaattatgtttcaacctccacatttaggcattgctgctatccattgttacatggaattctttattaggccagtgttcacatctgcctgtgcttgtgatttgttctgctgtttgtgtgtgccgtatgaacatataaaaaatatcgggttaaaatttccgttgcggttgtcattgttattttgccttctcatactacgtgtgaagctgaataatttagtgggaggttagctcattgctgtccctattaagtacccagaaaaactataatgtttagtcctcttggcctttcactacgctggaaggagtacaaattacaaacattaggaagcgtacacctgtttacaaagttgactatgagatggcaaatatatgttaggcaattagttagcttcctatcatgtttgctgcaaagttgtaaactgaacactccaacgagataattcccctggtaattggaagctctctggcaagaatgcatttgatttgatgctatgtttgggagtgggaccaattcatcaatttttgtttttcattttggatttgaatgcaaagataactttagaagctttcttgttccttttggcatccgctgctcacctgaccaagtgcacacaatgtacatgctgcccaatatactgtacatcaccataccagaaaaaagacaaactttgagttacagcaaccaatttattttcatattcgttgcacgtgaccaaacaaaaataagaaacaaaaggtacatataatttttataaaaaaggtaaaaacaaacacaaaattatatccgaggagaacatcactgtatacatttataacagcaagctaaagtacgcatttccttttttttttccgataacggaattcagtccactgaagctgcgaacttgcgtttgcagcaagacgatctacttgtccttcttgcgcttctcgacgacgaagaagaaggcgagcgcggcgatggagaaggtggagaagacgccggcggcgaccttgagggaggcgtggatgccggtgatcccggcgacgtcgaaggcggcgtccggcgagctctgcccgtaggccacctccgtgccggacgcgtccaccgcgtaggcgcgcacgaagtaggacgccgtcgggatgtcgcgcgccaccacgtagtcgaacctgccggcgccggcggcgtacggctgcacggtgaccttgaactggcacgccttgtccttgtgcaggtcgtcggaggccttgcgccacccgcggtccgtccggctcgccggcgcgtagcacagcttcaccttcacgctcttgaacgccgcgtcggcgcccgccggctccgacgtgttcagcgaccacgtcaccgtcaccgtgttctcgccggcgtgcacgactgctcaccaccggaataattttcccttgattagtgattagtaatagtagtactcttttcgtttcaggatataaaacgttttaactttgatcaaagttaaaagtttgacttagtttatagaaaaaattagtaaaatttttaacccaagacaaatttattataaaaatatattcaattattgatttgatgaaactaatttagtattaaaaatattactatatttatctataaacttagttaaacatatatttgtctataaatttagttaaacttgaaacagtttaactatgacggaagtcaaaacgtcttataacatgaaacggagagagtagtagccaaagtacatgtgacacttttaatctgattattttaacagccaaattcaacgaagcctaacgtgcacttatcatgattttttttaaaaaagaaaaagataaacgaaagtgagctaacaaaaaaaaaagattttgtagtacggccatgagaaaatgaagtgaacttgaaatgagaaaaaaaaatcttattattattattctttaaaataaaagaatagcataggccggcctggctatcactaggataggagtttcttagggacatattcttctcccttgctgttcatcccttttcggatgcatcgatcacaggcgacaaatcagacaaatcatcattcggagtttcagttgcgcaaatgggtatcggaacatattcttaaggctgattttacatcaaactttaggcgaaaaatactttttttttataatcgctagctaggtagccatgaagagcattttcggttcataatgctgcatgctaatcaagagcaatcttgggtggttcaaacacggtttcaaaatgcaacagtaaactgcctggttgtcggtcttgtcgagctggttcgaatttagaaaccgctggataaaccggccaagttcaaaaaaaaaatcaaaccaaataacttttggcaaaatgttaactgctcgatcagtaactgaatggtcaaacggtttttgtaagaaagaagcaagaaggtcatcatcatcagctactagttgttatataccttcaccgtgcttgggcgagacgccgacgacgagcgctttgggcagcttggagaggaacacctgcgtcttcgccgcggcggcggccgccggccggggcacgccggcgccgagcaagacgagcaccaacgagagagcagcaacgccggctagcctcgccattgctgacaaaccaaaccgactgattctggatatcaacccaaggacggagacggagacgaagaccaagaaatgaatctgctgctgctgctgatgctgagatcgatcgatcgatcgatcggtgaatttataggcgggagagcgaggctacgagctcggagagttgaccagctacttcgttggattcaagaggcaacttaattgttgtaatgatcaagttgattaagtttagtggggtcggggatatccaaagtcagaggctttgacgacgtgtgagaagagaagagaagagagagatcatgcggttttgggggtaattaagcttttggaggggtcccaagggttcaggcaaccggtgagaagcggcaaccgcgaatgatcttgagtgcctcggttgttgttaattaaattgtgagcatgacgttcatggtaggttcatttggcattaagataataacattggagttattaacgttgagaaggcgttcttaatggaggaaaatttgatgatataccagtgttttggcaaaaaaaaataaatttagatgttttcatatggaaaaaaactcaaaaagagtccatttcactcatccaaactattttaggttcattgagcattaagatatcacattggaattattaatattgagaaggcgttcttaatggatgaaaatttgatgatatactagtgttttggcaaaaaataaatttagatgtttttcatatgaaaaaaaaatcatttcgctcctccaaactattttgccacagcatttaacctcctaacaattcctcagcttagtttacaccctgaactattgaaaacagttcaacttactctctaataatattcctcaagtactgctgtactcctacttccgaagagatgacatgcatgagcgcaagagcaggacagccatccgtcgatcgaactcgaacacgaccaagtctgcactgtgttgatcatatcagctcagctcagctagctggtggccagctccgtctcttgattgcctagtgctgcaattatatcgacccagttctagctagctttgctcaagttgtccaagcagatcgatgctttgaaacaacagcctgccgaaaataggcaatcgattcttacttaccacgatgagagtaattatcctatgaaatggcatatgatcattgaaacttggtagcagtttcgccacgacacaccgcaaaaatcctttttttaaaagtactacctttaatttaaaatatctgacgatgttgattttgaacataacagctgaaagtttattttattttaaatttatcattaaatatactttaagtataataaattttaaagtttcactaaattttgacaaatgatcaaacgcatataactatataagttaacggtacgtacatttaaaatgagtacagtacaatggacatcggctcacacaacacaaccacacccatatcatcacaaacagctctatttttttccttctaacttttacatgatactcactctgtttcacaatataagtcattctagcatttcccatattcatatcgatgctaacgaatctaaacatatatatcaatctagattcaaacatcaatatgaatgtgaaaaatattagaatgacttacattgtgaaacggaggaagtactttcggcagaggactaggagtgaggtaggagtgaggtgggagaggtggggaatcgtgtgagatgccctagtgccctaggacacatttcctctcatatctgatatgttggtctagttgattaaagccaatgtttaaccccagctagttggtaacgataatgtattgagatccaatgcagttgtcactatgactgcacaatagcaactgcacacaatttgagcccacacaatttgagcccttcttgatccaatggtccaaatctattgatacagtaaaaatcaaaattttactatttgtcagagcaaatcgctgcagtatttagatgcgtctggaattctgaatcatgtgttttaaatctggtggtgctcgtgtgactgcttaacttgtggccacactagccactgcacctcaagcggatccaacggctattcatcttaaaataagtttatttttcacctattccacacatagtaattcaaaactaaaaagactataatactcatactttatcaaatctcaatacaactatttccactttatctactctcaatacaattatttcgtacttccacaaatttcaatgcaatgattattctacaaatgaacttattttgatacaaataaaatgagctaaaaatgaacttactaggagacgtaggaagtatgctattagttcttataaaacaattaatttatgatataccagttagacatgagccctagctatatttctatttaaataatagaggggaaaatgttattaataggaaaacgagtaaatttcggaaaagcacaactattttcgttaaaactactagtttgcgacaacttcacctggttttcttacaaagtggaatggaacaatagttgatgattttctgcaactttttttttgtcttattggttttggcctatatgtcagacatacatataaatatataatacttatactgttgcaagttgggtccacatgtcagacactcataccagttaaagttgtggggttttggtaaaattgttcacaatcgttgtagttttgttagatgtcctgctatagttacagctaactgataagctaactgataatttgcagttttacgaaatccactctaggaaatactactccctccgtttcaaaatgtttgacaccgttgacttttcagtacgtgtttgatcattcgtcttattcaaaaaatttaagtaattatttattctttttatatcatttgattcattgttaaatatactttcatgtacacatatagttttacatattttacaattttttttaataagacgaacggttaaacatgtgttaaaaagtcaacggtgagtattagggtatgcagagtccaggagcaaacggtcaaatttctcatttttagaacgcccagcagatggggtcaaatttatcatcaaggagtactactcaattgttgcaaaacccagtgtcatatatatgatcatcctcggtgtatctggtaatgttgcttgatggcatgatagcaacagcatgccggcattgacatggtaaaaacaaaaataactaataattaaaagaggacacacacttcatgtggggtcatgtggctcttaacaccggttaagagttacaagaaacatcattttgtttgacttgcctctatcgattagtgtgaaaatacagagaagacgtttggcttatcaactggcgtttagatgtcatgagactatgagagtgataggaggagagtggcaggtcaggaagaatgatcgacaccgggacagatcatacttaattatataatgtcgacatgattgttgagggaatgatacgtttttaggccttgtttggggcaaattcttgtgctggctgtcattgactaggagttgtgttcttcgccctggaatttaatctttcttgggtattgcttccttatcatttgatcacctatcttattaaaaattacaattatcatttactccctccgtctcaaaatataagcatttttagtatagtgacaagtcaaacatttttaacttttaccattaatagcaaaaaaataaaaaagattaatcatgtaaaattgatgttactagatttatcattaaacaaactatcataatatcataatatgtaactctttttatttaaaacatcttacttttatagatattgttagtcaaagtagcatattagagaccgtgttagggtctaaaaatgctatattttaggaactaccatttgtaaagaactaccattaatttccttgaaacttgatagcaatgatccaggcctgtttgggaacaataaatttgaccaaattgtatacgaaagaaagagattcctacggaaattctacctcccaaacgagatgaaacctagtaacctacaggctacagccataaattcaaaacatggaaagcttgatttttcccccatacatgtacaatgggcttacattacggagccgcaacaactcacagccggaggtgctcgaaaagcttggacgtcacaagagcagtttgctcatagaccgatattcgttagcgagattgcagttcttgaagcagagggccaatcctttgagcgccaagaaataatgcgtcgacaagcacgagtgctccaacctgttgttccaggaaggaacatataaaagcatttccattggagaaaagaattgatgtgtgcctctcttgaattcagagaattaccaaacggcctgtgaagatcagacggtagcccagcccttctttcacagcctgcgctcgttgctgatccgtccagctgaaatgaagtcgttgtcagtacacaaagcttaaagatttgtaatcagatggagtgctctggagtatggaggagcgatagtgcatgcttctgtggaagtctgaaacatatttctaataagaaaatcccattataatgctcatctgcctgtgtagacacaatctgaagttttaagttgttggcgagttctagcttgcctatctcattatcacattattctgttcttgtactcaaacaactgctttgattttaatacatgacttgtgtatgtagattggacagataataatagggataataaaccactaggaggggagaatagctggggtcttgaaacctacccgaaaaattccgaaaccccaccaataccagcaagcttgaaaggctggggaccttctcgctcaaagtcctgaaggggtaaaattataaaccataattcagtaaaaagaagtactccctccatcccctaatataagggattttgacattttgcttgcactgtttgaccactcgtcttatttaaaaattttgtgcaaatataaaaaacgaaaagttgtacttaaagtactttgaataataaagtaagtcacaaataaaataaataataatccaaatttttttgaataagacaaatggacaaacaatgcaagcaaaatgtcaaaatcccttatattaggggacgaagggagtagcatatatgaaataattatttcttttcccaattcctacctcctcttcagctgcttccagtcctccttgtacccagaataaattttggaaaccagcaccatagagttgctcacaagcggccaatgatctgaccgaattacgggcaaaagtgaacacaactaataaaattacacatccatgaagggcaacacaagaatgcattactgaattgactttctcaaaaggtaaacaacgcgataaagtattgatatgcaattatgcatatcaaattcagcattgataagatagtgaattacctcagtcccttctggcaaactactatgatatctgtatctttagaaaacttctcctcaacttgttgtacaaagttcctagcaatttgatctacgatcagtcaatcttactgttctgaaaatagcagatgaaagttctaaattcagtagatgttgagcgtacttgttaactgtcattgttgagctgccactccaccagccacctagggaagtcatgggagttcgatcatttggatgtcccgaattgtaggaggggtgatgtaagagttgaaaaataaattcacaggctcacagaggatagaacactaacataaaacagaaagctacacatgccttggttcaagtaattgtgtttcatgaactactactgtggttagtatgatggtaatctaaaagacgtatgtaaactggtcaaacagcccagagaaaatcatcattgcattatccattctagagtgtacacatggaaaacattccatgttacaatctcctgtgcttagtttaatgatgaacaatgagaacaaggtttgtaaagaaagcattcaagaacaagagattgacagtcaggtttgcatatggtgaccctgtttagcatacccatcacatagttggtgaatttcttgccggcgccacccaaatcaaacgatgtatccacatcaaatacaggaatccaggtagagcctttcacccaggcctaaaatgcgccaattcaaatacaatcaaggacaacgaaaaacaatcccattccgcaataatcaaacacccctttactttaagagtcttgacaggcagcgagacacaaccttttgacgctcattcgagggcctaacatcaaggaggaccttgtcagtgagcttgaatgtatagccagcttccctgggtgtaagagtcttgatcttctgctccctaatcttcaggcagagcatcattcccacacacacatgaacagcagaagatcagcatttcaatagccatagatcacgcaagatgatactgaattgaaacccaaatgtgggggaaatcgtaagaagaatttgcaggcagggagggttagggtaaggtgaagggacacaccagagtctcccatcgcctccgggcggcggccatctccttggccagcttcacctcctcgtcctcgccctcctgctcccctcccacggccgctcccatcctcaccactccactccacctctgcacccaagaaaccactcacacagttgcagtcaccgctcagtggaaatgagagcaaaggagaaggggaggaaagccaagaaaggaaaatggccgcacctttgaaggaaggagacgagggcggaggcgcctggagcggcaggaagaggaccacgccgcggccggggtggcggcgccggcgccggatacgcggcgcgcgaggccgagaggtgacggtggcgcggccatgtctgtgagatggccgtgttctttcagaacggaggttttttttagcttctagccgtagctttatccccccaatccagttccctgccctgcaattggatgatgggggtgcaactccagacttgtgggaccctcgacagcgctaagccagattgcgatgtagtggtattttctcagtcccaaaatagatcaacgtataaatacgaaaggtgaatctaaaatgaccttttttaaaaaatgaacacgtgataaatgtttatttttcacaaaaataagctacctttttaaaatgggaatgctatgagacggctgccatttgtatcatgtcctaactgatatcaggcgacacctactaggtatcgattgatacctgataagtatcacatgatacctcgtaagtatcacctgatacctagtagttgtcggctgataccgattatgtatcatactacctccgtcctagaatataacaatctaaaatgggatgagacaaatcctaggacaatgtatgtagacatgcctcatgtccagatacattgtcttaggattggtctcatcccatcctaggtgctatattttgaggcggagggagtaagttctaagttctaactggtactatcctgtttgaatgggattccgttctaagttttaagcaccgtcatcatgtatcaagcctacagttggtacttgggccggcacgtcccataatgggtctagaatcttggcacgacgggcggcctggcctggcccagcctggtaaatgggccattcttgtgccagctcggtacgctgataaaccaatagcatgtgaatggctcgatagcccaacaaacacaaggcctaggctgcgaggtcaccccggccagctcaccacagcggtgtcgtgcgctcgtccgtcggccaccgcggcacactgtgtcttctctcgagacatcgacattgaaggtgctcggcggctagcggcgatggagaaataggcggtggcggtggcagcacaaggtatagcgacgacgttagcctttctttaagcaataaaatcaacaatcaatacaaaatcataggtaagtgcaaaaccattattttatggtgcagtacagagtctagtggagtgcgagtatatactccatccgtggacttgtgggcccattaccacccctagccgtgagagacggcgacctggagaagggtggtgagctagcattggaggcggggctaaagcgagcttgttgttaggacgtggtgtggatggtggtggatccaactgcagggagccgttcaagatgaggaaaacggtgaggctggtgcacctcactaccaactactaaaagatgagttggggggaggggggaggggaggtccaccaagggcgcataccaacggattaaaagatgaggagagaggggaggggagggggtggaggaggagaaggtcagccaaaggggcctcgttggcgctattgacgtcttcatactaatcgatggggtcgggcaatgacgcattggtgcagaggaggcatggttgagctgatgtcatgtgatgccatggagggaagagaaaaagaacaggagggttatggtttggagggatttacacgaatcttaaagcaacccgatgatctaaaatctacaagattgtaggggctcccaaaatttaactccaattaatcttggattagggccgaaacaattgatgatacttgttcatgctgatgttgctgaaacaatgtttctttgtagaaatgaatttacatcttatgttgcttgcttcatagagtagtgcgaaagagatgcgcacgatctcgcttcaatctgatcgcattgttgtccttggaaacaagacaacgctactagaacagggaaccaactcatttacctggcgaagtatgcaaggcgacaattaatggaggggatacactgaccaggattgggcatgcagaaatatgtgttcagagcacttcgggagatgccttagcctttatggccatccagttcccaggctcccagctttgcgattggatcaggggagtgcaaatgcagtcatgtggggccctggggtcagagaggagcctgaagaacctgcatcactggctcactggctcactgcatgacaacacaatacaacgaccgcgaacatagttacacaatccacaagtactcagcaaatatgcaaaagcaggatatggtgttacactattgccttacgccagtaatctacgaagacttcattgttcccacaagagagattactagtttggcaacaagcgtacaacagattatataagacagcacatgtccagagtaacatttacttcgaataaattacaggctcgccctcaatacaggcgtacaacaaattgcatcgcatctaatctatagtattcgtacatggcatttatacattaaaattggtggcttaaaaagggagaccttgggggcgcaatccaagacatttcttcagggcgattctggccttctctgccatcatataaccgtgcaggttgctccatttggacagtatgaaatgtcttgctgcacacatagagcattatctggcaacagccattgctaaccgcggtgacaaacttggccagtgtgcagtgccacatcgccatgctgatctggtgtctgatcctcacgtgaacaactctttagatagaagctgttgcgcaaggtactggccttctggttcctcaaggtaaaccttgtcagtcagataattctgtagattacttgcagcctcagcctgaattcgtgagccttgttccttcaaagcgggtaagaagcaccgcaatattacatctagaagtttcatgaactgtgatccgtatttcttgtgaagtgcaaaaccagcaacctgaacagaaacagaatccaagttggctacaacaaacctgctacaagcacacacgcataggaggggatgggggtcttgaagcatatttttaccttgaggaaagcatgaagggcacaagcagttgctgtggtggccgggagagtattaaggaacatggcaagccatttccacccctcagctaagccatgtggatgccgcacgcccctaatttcggtctgtagaaaaaaattgcggttgtatttcaattctaaataaaacatcaatttgttgaacagaagtctgctgctcaaataaaacgatcatatgaaacggtattaacactggatgaacttatggaactgtgatagtgaattcaattaatgtgcaaagcaacacatgttacactcagagtcagtgcactgaaaagagttatctgatcactgagagtcgtatgcacaatgcactgtgctagttggagccattttggcaaactgtctttcacgttggttgtaatggtttttctgtgagctcgtcacctctgtggtggcccatgtctaaataatatcccaggaaagaaaaactgacaaattgcaattaaagagaaataataagccctttttgcaacaaccaacaagacaagaaagcaccatattagtagagagggaaccaacaaaacactcaaaaccattaaatgcatacccatttctaacaattaataaccctaacagctatttttaccacactagtaatattagaaaacaggccatacacacctgaatcattgcagcatacagcttgacgtatgcggcaacatatgtcaaataactttcagtgctctcgagttgtccattttcttcctggtagccaatcagtctgtaataatctctattccgtacttgtgcctaaacaattacaagtaaaatcaggaaaaaaaatacatgagctaaacacaaaaataattatgtgaataaaacatcattataattgttcaaaacacctaaatagaacacctcacttgttttttccattgctgctcatatataagcaagaatataaacaagctgcaaagatattgaggagtttagtggcatgaagacttacgtttaaagcatgcagatgctttggaactgtgtacatgcaaactctgtggaactcagctagaagataatccattgcatctggtacctgagcatttgtgttagtaaattattaaacttcattgaaagagcaaagccaggataggagtgtacagaaatattggaactagctatcgtcttagtggtcatgcagcaacgaattttgttttgagttccaaccatgataagaaaatcacaagattgtgcattatgtggttgcaaactaggctgcaaaaaagttgatcagtgtatgacaaaagatacacagtagccctatgttcatcggaatcaactggagtatctatcccagctactggcaaacagcatgtgagtttccatgctccataattattaaccttccactgtttattgccatcaaatttaaggacacttaatatccacttcctctaaccatgacgaacagtgcaatagttcatcattgcatgccacttcatgtttaaatgaggtgtcaaaagcagcttcaacttttaaacttaacatgaaacataacgaaaattagttactgtgggtttccattccacttattaaggatgagctgtcatgtaaggaagaaatagtcttttcctactataaactaattttaagtatcaatatacttccaccaatcaagaattcatgatcacaacatatgccttctgaaatatcagaagagagctataagaaagaaaactgagtgcggtaaatgtccagaaagtgagcacaattcgatatgcacttattaacaaaagtaatgcctagtaaaactaaaaaacacaaacatacctggctggtgactagaagcatgacatatccacaagcaaaggccaaatttccaaatgttttgtcctttgtatttctactcttgacgattgaaataatctgcaaatcaatatcaggtcagctatgtaagtcaacaatatcaagtagaattcagtatgtcaaaatggacagcccggtaggactctaattctagtacatgagaaggccaaaaatttctagttagagttatgtgagcacacttaagttcatgttggcaacaacagaccagtactgcagaggtatacactacaatagagagactatgcaaagccaaaaagtgaagtggtaaatccatgtttctaaaaaaatgtaactgaagtttagatgattggtatgttaaatggtgacatgatgctattactttacatattctagacacattttttctattaaaaaaatgtgtctaaaaattgtaaggtcatcatgtaggcagttaacataccaattatctaaactataaaacaggtatttgatggttcatgtttcgactttcaactattgaccgacaagtcagttcataaagcaagtgtttgggcctaagtttatattagcaagtatgttcgtacttatattgaacatatggataaaaatattgcatggtcatgtcgttcaactcagactttttgacatttcacacatatttatgatgctactcgtttgaaaaaagaggccattaccacataaaagtaccttgtttgcaaatatacggcaagcaattggacgtgggcaatcctgtccatccaaagctttaataagctcaccagcccttgctctgcaacaaatgtttaggggtagatttcaaattaaataaatattcaaatcaaatactcactttaaaacccttcaaaaacaactatatgaccaaaaggcaattagttcttatcacgcgtcaaatgatggaaaaaggagaatagatgtagatcttttttatttgaatgtgcttatgtgcattgagctatacggatctaggcagttaaaaatatgttttatatatatactcactttacactgtcagtagtcggcataagtttaccaatagattttgcaatttgtcggtcatatctgctgaactcctgcacaataaaaacaataatagtcaaatacaagcttaccacaattctcatccatatggcaaaagaactgaaaccagcagggtgaccatcattcatcatcaatgttaaaacaacaaatttgcagcaaattgtacaaatgcagttggaagaccttgctggaatgaatgttcgctggcacttgatcaagtaatgcacgcctccgcaattctgcttccagtgcagaatgatcagcaaagactttgatccctgttatgaatgagcaatcaacattaatatcacagtccttataaaatcaagctacgatagtcagccagtgaccagtgtagttaggaaattaacaccaaggctagaaattattcttgatacaaaaatggaatgtctgatgcagcgcatgaatgtgaaagcagaaccacagttttccctcgtgttatttatgtctgtatgcttttaagcgttgaaactgtgtatcccttcaagttttgcatggttcctggatcccactacaatggattttaattatatttcaaatattgctgttaggagtaggttgtctcagtaccacaacctttgtgctaattaaggaaacatggtaaagttctaggggctgaacatgggttttgcatagttgaagatcagttaggggtgattatccttctgacatgttataatacttttacatgatatatatggcccttcatgagcctaagcccacagtctaaataagtaaatatacaagaaaaatgagaaggttaatccttaaatttacgttttagattaatatccaccatttgatgttcataagcattaagctgtgataatggctgcctgacttagtatgaaaactagtttttaagaaatatgtatatagacacaacctgattctactaagcatatcaatcagcagatcttcagaatagctccataaaacattgcgatataaacttataatggttctgtaaaagcaagaaatacctggtaattcagatttaatttcactcttgtttgccctcattgttcctgcaacgttgttctgagaattttggctggatttggaaacctcagctgctgctttctgagcttctgctgcttcctttgcagcagcctcagctgctgctttctgtgcttccactgctaactttgcagctgccttctgtctggcctgcatcatagttcatgaaatttctggtaaactggttatgcatttaagcgactaccagtgaagtaaagaaaattaggtttctgaactacgtaggttgtaaagaagttcagtgaagaagtaacatgaataacaaggtattagatataactgaactagatggaactcaatggactaagtattatgataaataccagagccaaaagaaataacaatgaattaagtctcacatattgacatatatcaaaagaaatatatcagtttatgttaacaaaaacacaccaagtgaccagcacatctaggcaaacaaacctctgcttcttgtttggctctttcctgccttattttttcgtccttcatggcttgctcctttcttttagcttcttcaagagcagcatcatctcttattctacgttccacaatttgcgatttctgttcatgatccctttggaccatagacaaatgtttatcaagtacttctgcactgcaaaaaggcaacaattataacaaggtacagaatccaacaaaagatcatcagaaaatccaagtataacttataacgaaagatcatcagagtatatgtcctttatcctgtgagaactactacaaaggaaaacaaatacaaacgctaacatgcaaagtttctgaaaaaatatttacagtgctaatgattgaactggaacataaagttactacacaaagaagtacaaaaactatataattgtgtcacagatagttaattccttatataacacaaatagagcatttaaaaaatagtcaacccttagtctcagtcgctaatcatttgaccaaacaccacaggtataagtatggaatatttgtacgttaaacccacacgatttaatcagttgtgaatagaatatataaattgctgcaaaatgtaaagagctgaaaccttgggcttggaatttctcattgatcatttaagtagcaaatttaaccaaataacgatgaggataatagcaaatggtggaggaaacattaaggatcttagtattagtccacaatcacccaataaacctttatattggaatttgtgcatataggagatgattgttttctcttcaaaactatgtgcactagaaataatccatgataaactgtgtagctactagcaaggtccgtcagccttcatgaatatataccttttccactcaggagtaataaactatattggaatgaaaaacttagcactttgtaagccctctttacaataaaataaattgagttatgacaaataaaaatggcataactttacaaagcaaccaccaataaaaattcagtcttgacaaactagtacaagaatatcttgatatgtgccacagaaaatcctccagtaacaaaagagaacaaactagtacagaagttaaccctagtcccagaaaattgcatcaccaaagaccttgtaaaacatacagtttcctcaaaatttgaaaaatcaacagtaatcatgaaatgtagatttaaaaagacacaggagaaacaattcaacaacaaaaacatacatttttctctggaagtggacatctagccttctgtctatctcttttcttgattctgcgtatttctgtagtcgagcaaatgcagaaactgttcgctggatttcactttggtggcatacctccaatgcagatagtttacttctgacttcctcctgaagaaaaaaaatcatatgaagaaaatgaacaaaaaggattcagcagatttaataaatccatcatggtaaaaaataaaggcatgcaacatcagccaaaaagataattagtactatgatacccaatacttagaaatttagtcatatgacatccctgttggctttctatgttaaacttcttggatcacaatatccaatttgaagtaaatgcagtattgtatttgaaaaatcttcttcaagtagcaactaacagaagtgatgtattgtttttcttgaaatttcatcatgtcattatccaaccatatcagtgtggcactacactaaccttaaagggaacaaacaaaagcttcattcaggaattcatatacagtataaccttagaaagatgaaagataatggaagcatccacatgcctggatagcttaaaatacctacataaaggtgaggaaaaagatataaagttgatccgtaaagtgtaacctaatgccatggtaaccctaaactagaatgaggattaatggtaatgaaaataattcaatggtctattgccaacacatcaaagaaaaatcagcccataagtactgcattcagtaagaaagatataacagtatagattgatgaatacacacttgaactttcagatgatgctcacgttccagctcaagcagaatgctcttctctaggctccgtttctccatcaggtgatatggtgcaatcctgccatccatttcatcctctgattcttcagcatcactaggaagaaaacaaaagaaggggatatctcacacaatacgccattcatttaaacttaattgcagataatgtaccgtacttcaaagcaaataaattgcaattgcagtggccaaatttcagcatcaaatcttcacctggattcaagatcattgcatgagaaccttgctccagtggccttggccacaagagcccgggactccccatcactgtcgtaatcgtcctcatccgtgtcatcttcctcttcaacccgcatcacaaaggccttctccctcacgctgccactgctagccctaaatgaaccaaaaaaaaatcatatagaagcaatgtagagggaaacgattgcagcttatcggcgaaaccataagcaagggagcgcaagggattggagaatagagataccactccggcggctgcttgaggggcgtgggctgcgcggtgcggcgagtggcctcgagcgcgtcgagctcggtgaggacgtcgccgagggtccagctcgggcgggggtcgagggccctagggcaccgcagctccacgcgcgcgaagcccctgcgaggaggaggaggaagacgtagagatcagcctgcctgccattaacgaacaccaagcggtgacgagcggaaacggcgatggggggctcacatggcggccgtcgaccggcgaggtccgccccggagcggattggagccgcgccggcgcagcaaaaccccctaagttgcgggaggcggcggcggcggtggcggagaggcggtggacgctagttgggtctcccggctccagtcccacctccagccgctaatggagccgtgcagacaagacgcggtctcccttgctgccgcgcccggttggcttcctcgccgtcgccgctgcgccctgccctcccgtgccgcggtgccgctccgcctcagactggccgccgccgccggagcgcgaggccgggatgcgccgccgccggacgtagaggagagatgggccttgggccgaacactggttccggaggtttcgcttgcttattttggaagtacggttttctgagagcaaacggcaattcgaaataaaaccccagaacggaactacgataaaaaaccaaaacggagaacgaaaccgaaaagcaaagaaaaacggtagaaattcgattcggtggaccgacttggatcggcgatgcgaggaggtcggcggcgcggatagacagcggagcagatcgacgccggaatgggacggggaggcagccgtctaggccatggctgggccaatctggcgggctggggaagacgaagatgacgccaaggctgggccaacctgagcttaaaatgtcagaataagtctgtttcacctctctctctctctctctcttctttttctttttctttttctttttgcccttggtcgcatcgcatcccttaaccgtaaaaccgagtctaacattccaacttcaaaaacgggtttagattgactccttagatggttttggaagcggcttttgctgacatggcaatttgactttggtttaggtatgctgacgtggtagcccggtcatcaaaacaattgaaaatagaaatttgtcctatatgtaagtgataagaatgaaaataaaaaaatttgggacccaattgtcagctccattcctcccttcttcaatttgtatgtgcttcaagccgcactatgacacgtcaaagtgcggcggtgtggcttgcggtgtgtacagattgaagaaggaggagtggggctgacaactaccccttcccctgtttttgtttattttcatccttaccacttacatgtgagacccatttatatttttaattcttttaatgactgagataccaccttaaccaagccaaattgctacatcagcaagaaccgctttcaaaaccaccgacggaatgaaaaactggtttttgaagttgggggaggtgttatatcctgttttgtggtttaaggatgtcatttgaccaacagcaagggatgagtgaggtgaaaatagacttattcctaaatgtatgatcggacttggatgtcccattaaagaaacatttcgggcctattcagattgtagccaaaataaaccttaccaattttttttcaatttggcaatattgccaaattttgatatgatatcttatgtatttatcagagtttggtaaaaattaaattgatgcacatatttaacaactttaccaaaaaaaatggtatgatttgaaatggcatcaatcttaacaacccattcatatgatcaattgatcatgttattacaagaagcaaaacaacttaaattttgtttaaaaacacataattatatattatcccaacaaataaaacgaaagaaaaattatttttcagagataacaaaactgaagagaaaaataataatgttacgtaacatggttaatcaacaagtctcggagatcgattagccactgcatccgaagttccgaacatccgtctcgcaaagtgcatgctcccagactgacagaagaaaaattattgtatgtttagttaacatcaaaattgaaagtttggttaaaattagaacgatgtgatggaaaagttgaaagtttgtgtgtaggaaagttttaatgtgattgaaaagttgaaagtttgaaatttttttttgcaacttatcacggcgtaaggcgcaagaagtatagttaaccaacaccagtaatatcgtacagtactactccaacatgtcaccaaacttctctcggcgcgcccggggtgaactccaatctacccgggatcctaactcgccaccaaacctcctcgtcgttcttcttttaccgcggccggacacggagcaggagcacgcacgcacgtacggcgcgcgctcgcctcactgcatttctatcccggccatcggtccggccgtcacgatgcgccgccgcgtcgctctgtgcctcgtgcttttcgccttcgccggcctgcacgcggcggcggtggaggccgtgacgctgtcgacgtcgtcgcggtggatcgtggacgacgaggccggcgggcggcgggtgaagctggcgtgcgtcaactggccgtcgcacctggagccggtggtgacggaggggctcgggatgcagcccgtggacgccatctccaagaaggtggcgtcgctcgggttcaactgcgtcaggctgacgtaccccatcgcgctggccaccaacgcgtcgctgtcgtcgctcaccgtgcggcgctcgctcctcgcccacggcctcgccggcgcggtcgccggcgtcgaggccaacaaccccgggctcctcgacctcacgctgatcgagtcgttcagggccgtggtcgacagcctcggggagagcggcgtcatggtgatcctggacaaccacgtgagccggcccggctggtgctgcgccgacgacgacggcaatggcttcttcggcgaccggcacttcgaccccgacgcctgggtgcgcgggctcggcgccatggccgcgctgttcgccggcgtccccaacgtcgtcggcatgagcctccgcaacgagctgcgtgggccgaggcagaacgccgacgactggtacaggtacatgcagatgggggcggaggcggtgcacgcggcgaacccggcggcgctggtgatcatgggcgggctcgggtacgacaccgacctgtcgttcctcgccgcgaggcccgtggacgtgagcttcgcggcggcggagcgggggaagctggtgttcgagctgcactggtacagcttcgccgacgcgcgcgcctgggagtccgaggacgccaacgaggtgtgcggccgcgtggcgcggggcgtcgcgcggcggggcgggttcctgctcgacgccgggttcccgctcttcctcagcgagttcggcgccgacacacgcggcggctcgcgcaaggacgaccggtacctcccctgcgccgccgccgtcgccgccgagctcgacctcgactgggcgctctgggcgctgcaggggagctacgcgctgcggcagggcgtcgccggggccgacgaggtgtacggcgtcctcgactggtcgtggagcaagccccgcaacgcgaccgcgctctcgaggatccagtcgctgcagcgcccgctccgaggtcagttcgctgtcaacggcgtcgctcgctcgcgccatcatcgccggtgcaacgtttctaattgaccgaagggttcgccggcgatgcgatgcgtgcagggcctggctacgacgaggcgaggccgtacaccgtgctgttccacccgctgacggggcgctgcgtggtgaggcgcgcggcggatgacgcggcggcggcggcggcgacgctggagctgggccggtgcgaggacacggacgcgtgggcctacacgcagccggcgtcgacgctggcgatgcggggcgcggggcggggctcgccgccgctctgcctgagagccgaggggagcggccggccggcgcggctcgccaccagcgacgccggcggctgccgcggcgacgccctgtcgacgtggcgcctcgtgtcgggctcgacgatgcacgtggccgtcaacgcgacgacgacgacgacgccatctcgggacggcggcggcgggctgctgtgcctggacgtcggcgacgacggccggagcgtggtgacgaacccgtgcaggtgcctcgacgacgccgccgccggcgagtgcgacccagagacccagtggttcaagctcgtcaccagcacgaggtccccggccaccggcgccgccgcggcggccaccgtggcgcgagggctaattgctgcgtgaaaatcgaccgatcaatcgatcgtgtccgtgcattcgtcatcagagaatcgaaatcttatttaaaatccgcgaacacaacactatactagctgctagctgacttgcattgatcttggatggaagttagagagttcgtgtcacgcacgtggcgcgcgccaagctgcagttcatgtgtggtcgatgtatccatgtactgttactgaacagtgcgcttgagctgaaccattgaacggatcaagaactaattaaatactccctccatactggtaaaggaagtcgtttaggacaatgtttaagttaaactttaaaaatataaatcataaataactctcaagttgttgagtttgaaaatgttaaaattatatgaatagatttgtcttgaaaaataccttcataaaagtatacatatatcactttttaataaatatttctatagaaacaagaagttaaaagttaaagttatgttttgaagaccgtgtcgctatctaaaacgactttctttagtagtacggagggagtatttaattagttcttgatccgttcaatggttcagctcaaaaaagttaaagttgtacacaccagaggtcaccagctatattattactcgtatggtttaagagaacacacaccatattaagttttttttgcatgggttcgtgctggtcccacatgttcactgcaggaacgaccattgggagggtgttaattcgattagcgcgttaattaatttgggaacagtagccactagccacgcacgaacatgagatcgttgcacggtaggcattgccgcacacacgatcgacgacctaacaagcggctagacaagtcgaagaaagagctcgagatcacttttccggaaagtgttttcacatttaagggacactattcattttcttaaaaatacgcacaattgagtcatgaaatcctttttaaaaaagattaataatgttggtataatgactggctgtttgctgcatgcggctgcgctgcacagacgaacagaagaaatgctagttgggttcctgtagcagatggctgtggcgcaccgaacaagccctatagtaataaaacattccgactgagtttttacgttaataaaaaagatataggcataggttagtgtggagattatgggtatcccatatctacacggcgacggtattcgaactgggtaccggatacttaatgtagatagaatatcttatctgtatctcgggtttgtttcttaacttgtgtatcaaggaaacaccctgagacttagtcggttacgactgtattttacctctatcttcatattccgttaggaatatagattatcttttgtaatccggactccttcccatatataaggggggtccgggcacctctaggggcatatgctgatttttcccgaatcatacaattaataatacactcggcggattcatccccggacaggagtagggtattacttcttttataagaaggcctgaacctgtataaatcctttgtctccaaacccatacactttccgagcttgatagccacccccttttattattgccgaaatctagtttcgacagttggcgcgccaggtagggggagcgtcaagcttttcgccgatcagtgcaatgggttccgtctccggcatcgacgacctcgtcttcccacccgggcagacgtttcggttcggcagcctcgacttcatcaccaacaacttcggcaagatttctctcctcgactcggaatcagaccagtcgggagagaaccggctttcggtcccgtttggattcccgaacgcggctgaaagctacttcaagaccatctcaaccgagtcggcttcaaaccactcggccgagatcgcatcttctacaacgacaccagatcaagatgatggggcttacccaccggtcctgatgaagctccccgacgatttagcggccgtcttcaccatgacagcgtcttcatcccgtaggcctaggcggaagtcggcttcaacaccgctttcgcctagcttcagggaagtcggcgtcatcctccaaccactcggcacggtttcgacggatcagctggatgactacaacagctctcccaccgtcgactcacgtcctactgacatcgtggagtacgacgaattcagttctcgctacgacgacttcgacgacttcgacggaagcctagatgacaattacacccctctctactttggcgttttcatggccaataatgagacggaggagcaacgccaagcccgggagactgaagaacgtcgccgactggaggaggagcatcaagtacaagaacaagaacggctacggcgtgagcagcaggaccgtgagcggatcgccaaggaggctgaagatcgacgtcagcgagctttggaagcagggcgccgagcgcgtgatctcatcggccaacaagatgtcgaagggacaccggttttccgcacccctcaacagaatgcggttgccgcgatcacccttctcgacaccctcctcaaccaaaacgagctcaatcgttccgaccacgtcgtcaacatcttgaaccagacgaagaccatgatcgcagcatcggtcccagttaactccgaaagcgtccacacgccgactggcagccgggtcccccacttccgatctcatgactaccgtcatccaagccccagcatcactggagcaggatccaatcgcaggagcaggggccacgacgagcggtctgttcactcgcctcccgaacttcatagggagcgccgagtggaacggcctcgctcaccacctcgtcgccgccccatcgatcttcgcgacacaatcatacagcgccgagcagctcgaggctaccatcactcgccggatcggcacaagttatctcctctatgggaagggccatttattatctctgaagttacccgaccaggttcatatcgactcaagcgcgaagacggcactctcgtcgacaactcttggaacattgaacatcttcgtcgtttctacgcttaactttatcattgtatctccctattttgactgtcaacatcaagttttcttcttgccgttgtcagtcgggggctattatcacaataatggagtgtgattttttatcaattcagtttgcttacttggtttatcattgccttgtttggtttttctacttagtttgagaggactgaaagtttttaatagcttctttgggttttaggctcaacaaagcttagcaaaaacttttaagaaatcaaaaactttgcaagaatcatcaagcacagcataaatacaccagtattgtacaaattgagcctccatgtattacatccaaactcagtcagagtcagtcctttcatcatcagagtcatcattactcggctggaggtcgttgttgcgaaattgctccacaacatcactcgctattttgtcagccgcagtttgcgcactactgataagatcaagggcagcttcttcacttgtcccgtctgcaaatccatcaatggtgtcgacttcaattctcgggtacaaggattttgtcatcgccaaggccatgccagctcccatacttccagctttcttgatattcttgaaatacacttccggagcaacactcagcttgtcaaatatttcggttgcgtcgagtgcactcggaccaccattattgaggaacatggcttagatgattggagcagcagcattggcgacatcatctcttgctccttctagcctcttgatcttaccaaccaggacgtcgaattgagcttgagacttgatcttgcggtctacaaaacatatttatggtgagaatctgctgcattaaaaagagacaagttcaggccaatagctggcagtaccttcaacttccttcaaggccgagtccctctgcgcagccagttctacattgtctctctccagggcttcaacttgctttttcatttgttccattctggcggcttgcgctgtttgagatccagatggttgaggatacagttatgttggcctaaatcaatggaacagatctggatgattaccttttgatgaaccacttagttcgaagtttgcatcctggagctgagcgattcgatcccttaactccttctccgtcttcttggcgtgctccttggcctcatgtagctggtccctaaccgcttcaagagttcccaaatgaggaaccagcttttccaaagttgtggtcttggcttcattgcgaagatggattctctgcatgatggatcatagttcagttctgctaaaaagaaaaacaaagttaccgaaggctgtcgctcggaagacttacatttacaatacgagtggcctctccaagcgctttcttcagctggcacacttcttcatcttctttttgacggtttatgactataccggcggcttgtgagttctcgtcccaccatttgatcaagataggaggacgagagtcgtcggtcgcctttatgcgagggatttcttctccgtcatcacctgatggtcctgatgtgtttccaggacattagacggatacactgaggttatttaaatcaccgttgtatgagaagacaactaacctgaagatgtacctagctgagcgtgaggtgatctttgttctttgcctggagatccagttatcgagtcattaccagcttctggcccttgggaagctgtcgtctgcgcttctacttcagggatttcttgatcagggcttgcgtccaactggtttccagtcgggggctcttgagttgttgctgcttcagttgttgccgactggtttccagtcggcggctggtcactcggattggcctggtcacccgaagcatgggcgccggtcggctggcttttggcagtcggctggctttcggcagttggctcggggtctttggatatattttgctctgccatggctggatcggggtcttttccagatggatctatatcagatggtttcctgcaaagtattctttcagaatttagcatcattttcatgagagagcttaccaaagtgaaatcataccgagaggtcttatacctggaagatgttctaatttttagcattgcgcggccggccagttttttcctgggcatggtgcgctttgggggtttattaggcgagcccttatccccagatttatcatcgtcgccttcatcgtcatcaagcaccagtttcctcttgcgaggacccgtctgaccagttgatttggaggtctgaggttgcggatctggtctgatcgttggccctccacctccctgagcagtgtgttggcgaggagaccggcgctgagtgactggtggatctgatttcatcagtgcatattcctgaacaagatgcttccatagttagtcaattcagcatgaagacaaaattatgttctgatcatggtttgaagatttccgatacatacctgcggaggcggattgaatgcattatatggcacgactggcagctggtgtgagtagctgacgacgattgcatttgagaagattttatacatcctctccttcatgattctgaaatccagagagtctgattcttcacggttaggatcatacttgccgtcgaactcgaatgccgtgcgagatctttccttgattggcgctagtcggcatttgatgaaatgccgagtgatctgttctccctgtaagccttgttctttaagatttaacatacgatccaacaactccaaggcttgtactgcttcatctccgattggaagagagttccaagtatcttgatacactggaggaagacaagagtacccgggaagagcaggttcaggattctgaacatagaaccagtttgcatgccatcctttgttcgaagtcttgaagggcattgagaaatatttttggctcagagttccccttagttggaatcctgcccccccgactacacacggtttgttcttgtttggttggggcttgaggaagaagattcggcggaatagggcaaagtgaggtttgatccccaaaaaggcttcacaagcatggacgaaattggcgatatgcactatggaattcgggtttaggtgatgcaagctgattccatagaaattcaagatcccgcggaaaaattttgaggtcggaagagcaaagccgccgtagaagaaatgcgagaagaccacaatctcatgagtatccggagacgggaaagcctcaccgtgcgctggtcgccacccgatgatctccttggcagggagaacgccgtgcgccaccatctccttaagattctcctccgttacatcggatgacgcccattggccttcgaagctttctctctcttccgccatcggtttcactcaaatgtgctgatttgattcgagggatggcttgggagaggtgagggattgaggcggtggatcacgggaaggattttaatgcacttttcggaggtggatttggccggagtcgtgaaccctagttcgccggcgcagctttgcactgtagcagggaatggggaaaatggcggggaagacgaagcgtcgcttggatataggatttttcagttaagggtatcggaggtgctaatgggcctaggcctgaacagtacttcagcccaatacttttaacagcgtggcccattgtgttccttagggacttaggcatattttgctttggcaatattatgcgcacaacagtgttgcccaatgctgatgaaatcctttttatgcggtcatataattctttggaattattgcaatgcaaattaaaaaggtgcccgacagaaaggcgttatgctgtttttgcaagcttttttaggctacaaaagctgtttgggttaactagggatgacttgtttttattatagtcatttccttggcgtgttatatgcctgttttcatggtaaatagtcatggcctaggctatttgacttatttattaccataatctttatgatacttgatgggtaatctttagagtttgtatattcggatgcctgtcaagtgtgttcattcgtgaactttttagaatgtaaaccactcggatttcttttattgtggctaaaaagcagtcggctagcatgcctatttaggcgccgcgtatgcttttgtcatataatgcacaattgtgttattattttgtctttcaactatatgtttagtttgttaactaatcacatagttgggggctacacctaattaggtgcatctattcgatgcaccatattcttcatcttttcgccctttacagtccactcggcaggttttggcttgaagagtttgaagtactcgggttatcaactttgagaaggctacgatggtcgactgcaaaggactcgggggctactgtggagattatgggtatcccatatctacacggcgacggtattcgaactgggtaccggatacttaatgtagatagaatatcttatctgtatctcgggtttgtttcttaacttgtgtatcaaggaaacaccctgagacttagtcggttacgactgtattttacctctatcttcatattccgttaggaatatagattatcttttgtaatccggactccttcccatatataaggggggtccgggcgcctctaggggcatatgctgatttttcccgaatcatacaattaataatacactcggcggattcatccccggacaggagtagggtattacttcttttataagaaggcctgaacctgtataaatcctttgtctccaaacccatacactttccgagcttgatagccacccccttttattattgccgaaatctagtttcgacagttaggtacttaattaggtgggttgtattactatgaatgttgatcgaattaagaatccatgtataccatgctcgatctcttttaattacagttgttctgaaatttaataattttgaaattcagaatcaacaaatgtgagatgtactcttagtttattaatactcatgaattcaattctaaaaatctacaataaataattagcacgatgtaattgacatggacgtactcttctattaatctaagctcttatatttcagaaaaataataatcgatgtgttcatcatgattaacattttaatatttgtaacatcaataacaatagtttgtgtaagacatgattggtgactagcacatacatataatatcctagtagaacatttgaagtctaagtttgaccaacacatcaaagaaaatccaaactgcaaacagtatgtgcactgtgttaattaccaccgtatttaattaatttttcttctcactttatatacatgtcaagcttagactaggatttttgtggtgtactagtagataccaatgtactgtttttttactaattccttacaagtatttgaattatattttaaaactaaaatatacacattcagttcgttgattatggccttgttccatttgttttggtcccttatccatggaaccgattaatgttggtataaaaaaccttcaaaatcatttatatttcatcgttggacccaaaaaatggtggtttttggtacattgccccctgttgcatcttactgacaaatcaaaaataaaaacaatatctacgagatggaagatatagaaaatagataaggatgacattatttatgttctattatttgcttatacgtttctctatctttctattgtttactatcgttgattaattgatgacattattgttgtctttacgtagacgtggacgtaaaaaaaattgcaacagatgacacatgaatgattttgagaaccaattgtaaaagatggaccaaaacaattgctgatggacaaaattaaactatgcttttttctttggaaataaaggtacatacacgggcagacatcctctttgagaggtagaatacacttgtttagtatcacaatatttagtatccatccgctctaaaataaactatcttcgtactagcatacgaatttagatatagagtccacttatttcgggacggatggggtacaccagagatgaacacacatacacagtcacacaggcaagaaaaatatacggagtagtaagcagaaatgtctgatgatttgatcgatcgcgtctttttccgccacactgtagtccagcgcgagacggcaccagctgctcttcactcttgagctgtttcacagtacagcgatcagtccagtcctcgagattacgattttctaatgacaattagcgcgggaaagcaatgtgtgtgagtagtttgttaattagcaatgcggagtaacgacagagactgtttggttggttagagatggttactgttgcagcttccgacagcaacgtggcgaccggctgcaacgtcgtcgtcgtcgtcgtcgtcggcgacgacgtggcgcggcggcggcgacggtggcggcggcgacctcctcctgaagcgcaccatgaggccgttcttcatgtacagcgtcgtggtcagcttcggcttcacctcctgcccgggcaccacctcgacggcgaacctggacagcaccgccgccgccgcggtcttcatctgcgtgtaggcgaaccgcttcccgatgcacagcctcgggccggcgttgaacaccgcgtacttgaacgggctctcgccgccggcgaacgcgccgccgcgcatccaccgctcgggccggaacgcggccgcgtcgtcgccccacgacgccgggtcgcgcccgatcgcgtaggtgtagtagatcacgcgctgccgcgctcgcaccggcgtgccgtccgggagcacgtcgtcggcgagggcctccttgaagtcgacgggcaccggcgggtacagccgcatcgcctccgtgagcgccgcgtggaggtagtccatcctcttgatgtcgccgcccgcggcgaggacgtcgccgacgacgcgggactcgacgtcggggtggccggcgagcagccagaagaaccaggcgagccccacggagctcgtgtcgcggcccgcgaggatgaagctgatgcagaagtcgcggaggaactcgttggagtagtcggcgcccggcgccgatgacatgagccgcgacaggaggtcgcaccggccgcgcaggctcccgaccttgcgcatctcgttccggcggtcggcgaccgcccgctcggcgaactcgcggacggcgcgcgtggcctcgacgagccgccgctcgctgccggcgcggaggagccgcttggccttccagatgaagggcggggtgacgaaccgcaggagcgagagctccgtggcgagctcgaacgcgcgcgcgaacggcacgtcggggaggccgtcggcgaggcacccggcgtccaccccgaacgccacggcgcagatgttgtcgaacgtgaaccggagcagcacctcctggaggtcgacggcggcgccgccgccactcagccgctcggccagcggcacgaggcggccgtacaccagctgctcgatgctcctcaccgagaactccacgaaccgcgacgagtgcatctcggcggtggccgcccggcgctgggcgcgccacgcctcgccgtcggcgttgaagataccgccgccgagcagctcgacgaagcgctcccggtagtagggccccttggggtagttgccgaagttggccctgagcacgtgctcgacgttggccggcgcggaggttatgacgccggaggagcccccgccccacgtgccgcggtacgggaacacgccgccggcgcgcagcagcgcggcggagccccactcgtagatgtcgtcgcggtggacgaacagcgtgggcacgatgcccactagcggccacagcaccggcgccccgcggcgccgcgcccgcaccgcgctcacggcggcgctgaacgcgaacagcaccgcgccggccaccgccaggtcgctcgcccgcacgtgctcccgcaccgcgccgacgatcgcggcggcggcggcggcggccatggacgcgatcgccatcgatcgtgtcgtgtctctctccggcgccggcgaagctgcgagactcagtgacccgtttcgatcgatggcgcgagagaccgcgagagactgagctaagcagctgggagtggagcgtatttatagctagggtgcatggcagcatgggggtggtgtcgcaatatgttgtttaattaatccattaattaattgacaaaaaaatagttggaggttggatttattaagtaagctagtgttgattatctttaaagaaaaaggaagagcgagcaattaatctactgtagaaatgatattgaaggttcaattctaggccccgcgcatttatacagtagctaggtaatttaagaagtgatcaacccatggatttaagaatgttaattttgtatagccgcatcgacgacgcctcacgaatctagcatgctagcattggagagaataatatcattaatttcgacggatctgcacacacactgcaacgctcatcgacatgcattggtttttcttacgacagataggtccatgagcaatccgttcgtgctgaaagagcttgtgtcaccgcaccggaaatcatcgggagacgatcgaaacgcgtctggcgtgttgggagcggattttttttttggtgtacaggccaggggcgatctcactgggcggatatataagaagtggttcttgtctctcgagactgacatcccctcatttcatacatatcgtttaaaaagttaccaatttttttaaaaaaaattattatgatagatcaatatataatatatcttttcgcaaacatgcgaattaaaattcgacttatacaattcgaaacaaaaataacaaatttgaccgtgaattacgcattatattcatagtcaaatttattgtttttgtttctatttgtataagtggaatttaaatttgcatgtttgtgaagtagcatatcacatattgttctatcctactaaattattttgatgactttttaagtgacatataaaaataataggatatccgcttaagggatgattcagtactctgggagaggaatatttttgtgtttttcttaaacatatatttctcttccatgtgataattaagacttgtgttgaatcttggtttgcatgcagtgtctcctgtgtatgcatatggcaaaccatgcattctcccaggaagaaggcctccatgccatgctgcagtaccacccggagatggatccagcataggggcgttggggtcttctgacgtaaagactgtaagaatcatcccactattttttttttaccatatccgtcaccggtaccaccggtacgatcgacatggtgcatgcaccggccggcaactcgatcatcctgggagtgtgcatgtatatatagtcggtctccatgcatgtatcgatccaccggcacgatggccagtcccagtacggccaaaattaatcgagccgcacgtgaggtgaaaaaaaaaaacacttaaattcatggctcaaatcggtttggatccttgagcgtcgtgatctcccttgggccattgtcgtcgtgcctctttcttctctctgataggactctccaggtgaaaatcagttatacgagtcattggatgaatagcgacggtactttcggtgtcacgttattcttacgagcgtcgttttaagaatattctgtttctatcctatgtcaccactaattagtaaggtcttcgacaaagctcttgggaatcgtctttgggtttgaagtttgaacgagggatgagtgaattttcttctctctcacactctccctcggtaaatccatctttgtggggatgaccacgagtgcgttggtggcttttctatttggagatgtgatagtacggtgcgtttatgccatcttggggctggcggcagccagcttggcgctagtctttttttttttctcaggaatgtgtgttacgagctatcaacatgtgatgatttgcctttgtttttttctttttgtggttgtcttctaggttataatctagtattttttttcttactacatactccctccgttacttaatataaggaatattgacattttgcttgtactgtttgaccattcgtcttattaaaaaaaatggaattattattttttttgacttactttattatccaaagtaattttaagtacaacttttcgttttcttatatttgcacaaattttttttgaataagacgagtggtcaaacaatgcaaataaaatgtcaaaatcccttataataggagacggagggagtatatttaagaaaattagtttgaatcaaatcgaacttataattgtaacgaactgagcggagccaaagttttaactcatttgcaaggctacttgcgagctactagttttactcattagtaaaagaaatatgtctattctaactaatatgtacttcctccgttcctaaaaaaaatcaactttgaatactattcttagttagtgtttattttctgttgtcgacgcatggcatatatcacatttttaaagctgatataattgggataaaactgattaacgaatctaactaggttgacaaagtcagctcacgaacctagccaaggcatggttttttggtttttttggggctgtttggaaaacagggatttgtcatgttacatccgatgtttggacactaatttagagtattaaacatagattaaatacaaaacacatttcataaccttggactaattcgcgagacgaatcttttgaacataattacaccatgatttaacaatgtgatgctaaagtaaacttttaataatcatagattaattagtcttaaaaaattcgtctcacggattaactcttatttatgaaattaattttttattagtctatattcaatactccaaattaacgttaaacatccgatgtgacagggacttaaaaagtttccccatctaaagagcgccttagcttgctagagttaatgaggctcgactggctcgttattccctcttagccgcatggacgcaagtggtcggcgcaaaccatgggagctcaccgtggatcgataaggaagtttcgcggagcccagccggcggccggtggccaagtggccggcgagtgaattccaccttccacacgagggaacggagaggcgcgcggatggggcggccgtcgagattgtgagaaattaagagcatgcccaagagatgcccaatactactcccaatcctaaaattttgaagttttatggaaaattttagctccaacagaactccaatcaagatcccaaaaaattggaaatcccaaccccgtcattctcgatctccacatgttgggaagaccgatggactcccaatccaccgatcgcacgaattcgcgcgcgctggtgaaatgtcctagccatcatgagctcgtctaccaccgccggcagcccccgagctcctccgtcgccggctcgttgcgagcttgtctggtgccgctggccctagagctcgtccgccatagcgtcaattcgcactgccgccagactcagagctcgtgtgccgtaggtctgtcgcttgttcctccgccgacttaattcgcgtagccgccggaccactattcgcgtcgccggcagccacagcaagcttgttcgccacaaacctgtcactagttcctcctcctccgacttgattcgcgtcgatgccgaacctcgaatcacatcgccgatagccgtcgcgagctcgtccgccacaagctcgattcacgctcccaatggagccctgattcgcacccacggccgagtcactccctcgtccacccatggctcgatttctattcgcacctcccggagctccgatttgcaccgcggccgcctgttgctagcttgtcggttgtcagtttgatttgtgtcaccggccaccgggatcctcctaccccagatacccccgttttatgccgccggcggtggtcgcgagctcatcggcctgcggattgattagcaacgccatcggacgtcgcgagctcacccaccaccaaaccccgatttgcgtcgccactggctgtcgcaagctcgtccgctatcggccccgattcatgccaccaccagctcgtcgtgcagccgtgcaggaggagagaacagagagaagatgaggaagaggaagaaaaggcacagctaggtgggcccacctgtctatataggaaggggaacggttgatagttttttaggtggtcccactttttattatacagaaccatgtttacatagtttgttggaagagaggatattttagatcctcaaatcctagttacaaatccctaaaaggtcattttgggagttgatttattggttatttgttggtgatgctctaagcgcgcgcccggcaaccgcctggcggggagggggggggggggggtggggtcagcattgagcctattgcctaagcattcatcaccggtcaagggccttggtgttttgttgtcgttggtggtggtgtctccatcccgcggtttactttaccgccaaactttttgctcgtttcggctgcaccgcttgcttcctcgctgccttgcaaacgttttccgagatgtccaagatgtcctcttgaagatgatggttttgtagctagaaaatggaaaaggatttgttggcctcaacaaccaggggacaaaaaccatcagaaaaagtaggctgcaggctgttgtgatgatactgtagaatagggcccggagcgatgcgatgcgatgcaaccgacgctgccggatttggtagcctttgtcgttgggctgcattttcgtccaggactcgagatcagtcaatactgcaagcagtgtgcgtgatataatatatcagtcaactaatgcacacaggagggtgcaagcagtagtagacaacatcaaaggtgaggaactaggggaagggggaaaaacaaacttacaagtacagcagcaaacatttgcacaggtgtcaatcaagagacaaaaaaacttaagctaaacgtaggcaggcttgaagcactgtgaatttgtgatagaaaagacccggctgtacttttcaaagaatgactcgaggcaatattctgttcactcattgggactattaaacagacaaaaagcaatccaactttccaagaattgataactgaaaatttgaagcaaacatatttagatgctgtacacattaaaattctgagacaacttgcgggtgtggtattacaatgaaatggcagataatttacaactcctgcagatttggcaacctggaggtccctatccaactcagttccatccccctatgcaggtaggggttcttccaaaactgtgatatcataaagtatcataaaaagaacagaaaaaaattgcataatgcacattaaatgtccatagaaacaaaaataccttttgttttttctgcagcttctggtctctctggtgccttagtgggtacatcaggaagctcaataacctcgtcaatgtcttctgcagcctcagtgacagcaggtgtttctgatttctcctcaggccgtacttcagtaactggagcatctggtagagactcaacggcaagctgcaacagacagtcatgatcaacaatagaagagataaaccgtttatggctcatgaaagttcagaattaaagcattttcatgttggtagtttgctcaaaatggaaaatgcataaaagctcctgaaaatcaataaaaacctgtgcttccaagttctcaaattcagccataacagcctcctcatcctcagcagatagctgctcacccagagcagcatttatctcctgcaatcaatattggtcgataagtaaacaatataaggaggtccatgcaattgtagttggagcaccaacacaacagaaggtaaggcaagtgcatagaccatcaatagaaaagaaaaacgatagcgctgtttgtgtaatctgacacgtcgatcacaaactcgcaaatctacaaatgttatgcaggtcagatccattcattcttaagctgttaactacatagaccaatgttacactcatgcacaactgtttccaattaaatccaattataggcacacaaatagagcacatcctatacaaaatcaggagacaactcatacattcaagaagcatatgggtgtaaacaataatgccgccattccagaaccaagactgctataatctttcagaaaacctacagagtctatttagtctggcataagttgatcaaaacagcttttataggaacccgatgtgataccaaaggtgtaactgaggatacagtaaaacaatttgagaccatgacttccagacaactaaggggataaaacaactgtaaatgtagtaacaagcaagagtgtagagtttattcaacttacatcttggtaagccttggcctcagctgtgtcgtccatcaacttttggacatcatcaatatttatctcattctggatagacttaagagcagcatttccagcttttaggctgtcaaatacagccttctgtttacttgctagttcaatgtctgacagctacaacaagcaaacaaaaagaggatgtcaatcatgcatcttaactgaacgtttcactgattatcaattccgattgtaagtaacagatattacccagtcaaattattttgaattcataaggagacagaatatgtccaatagactacgaacctgttgttcgacattcatttgccatgtgtcaacttgtttcagcagctcttcctgtgctttcttcttcttcagtgcaatcaaagctctgtctttcttcttttgttgaactagctgccgtgcagcttccttttctgcttcaatcaccttctcaagctggaagagggcaaaacaaaaaaaaaagaaaccatcataagcaaaactcattaggacctccatgattgttggtacaaaagaattgaactgatttaatgcgacatatgtgcactagcgcagtcaataatcatgcatagtcctattgtactacacacagcagatgcaacctgaagctatttcatgaacagaaaaatattctctgcggcagtgccacactacacagccagtgcaacaccgcgcagaatagtgacacgtgtttgatctcctgctacaggccaagccctctttggtgtcgagctgagcccatctcttgctgccgctgattggagtcaagctgaccaggagacaggagtacatcctgcatatggccgatatatagctaattagcttgtattagtcctgaagttttcgggtttcctatgtaaagatggtgttttggctctctttttatttctgcaatatagaccaaatgattttacatgctgtacaaatatgatgttgtgaacctgccaacctggtttcaacaccagttgtgtttttaagttgtcaatgaacacattgtaatttttacttaagtggttgggtatagtgttagaattggttgtgttttgcaaactttcaggccttcatgtggttggtattcctgtatagctcaacactagtacaattaaagattatcggagctactccttaaatgttccgtgatttgctatgtcatcaaaatgtaatttccgagcacccgaggcatcttgataaagtctaggtaaaggacttatatattacactagaaaatctccatgtatattatcatcaacggttgcttaaaaaagctctattgaaaattgaaatcattcaggcttcacatgtagctggtagatgcggcttggtagcattttcaacgagttgacagatgtgtgggtgtaggagaccagacatcggctcggctccagagttgggctcaggctgcagcgtgctattggacacgcatcattattctacgcagtgttgcacaggctgtggcgtgcggcactgccgcggagaatttttttccttcatgaacaagacaataacatgctaatgcagaaaataaagtcgttttgtggccaaatttgcgaggacgagatagctgcaatgcactctggcgtgcactagaagcaagcctggtttctgcaataacccgaacgtgtagtggcatttaccagaagtactagacgcataatgaaatcatcaaatcatctcttactagttactgtttactactactgattgtcacctggtgctctcgctgctactacgatcccatcaatccatgatagattgaagagcttcatgaatcaggccacgagaaaaaaaaaaaactaacaaggcgacaggcgaattcacccgaaacctaatccccaaccacctctcgcacaacccgccgcgatgggcggccgcagcggagaccaaatctggcacgatcccgaaaccccccaacacgcgcgatcgaacaggagcagcaggggaggagatcagccgggtggggacgggggcgcacctgctgctggaactgcgcgagcttccggcgctgcgtcttgagggtgaggatggccctgtccacgtccgtcaccttgggcttcttcacgaagatgttccccatggccgcgtgctgctgctacctacccggcgccctcttcttccttccgacgcggcggcggcggagatggccggagaggggaggtggaaggggagggggaaaggtggactctcgaggtcgaggaggagacgggcacggtaaccgtaagctggggaagtcgggaagggaggtttggggatgatgtggatcgggttgggtgtgcgactcaaagcggatcggatctggatttgttgttagtgggctagcgctcaaagcccaggagagatgggaggcccatttctcagatcgacgttgggccgcctggtacgccgatgctgtcgcaaaaggaacgaagagatattatttaactattttgcttgtaactgaaaccacgtgccatagatataagacggtatacaccgtgagagatactccctccgtcccataaataacgaatctagaaccgaatatgacatattttaatacgatgaatctagacatatgtatgtctagattcgtagtactaagatatatcacatccggtactaagttggtttttatgtgaccgagggagtaataaatagttaaacgtaaatgtcaccaaaatgactgttactaataaccccatccataatttttttcacctaacatagcaatgcaaaactaaaaaactaaaataccactattttattaaatcctatgcaactatatccaattttatttactcccaatacaattattatctactttcacaaactttgatgtgaaaataaacttttttaaaaacacagcacgaacgcaaacgcttacaacgcgcgtatactcacccgtataaacgtgaacacacactttatccctatgagcttctccagaggactggacatatattttttgagattaaagaagccaccacatccatctcgctatcgacggttacgtcatctaccattgaaaaaataattagccttaagtctaatacttaaatttggatgggttggtttcctcgcaataaacctaaccagttgagctacgctcactttgcaacataaaatttattttagaataggttgaacaagcttgttattacgggactgagggagtactaattactgtcaataaataatttgggcacagtagattttatcatatctttcaatctttcatcacaatatatataaataaaatggattggccaaagtagcatctctcgctcacgttgctccagcctaggggcaacgcgagcgccccccgcgcaccgaccaccgccataccttcctcctcccctctagctcgccatcgctcgagtggcccaccggaaagccatctggccgcaaggacggcggcagcggggcttcttcttcaccaaaacagcgtcagctggggcacccggcacccatggtaaaggcggctagatccagcaagggcacgccggcgcccacagtggaggcggccggatctggcaaaggcacgtcggcggacgtcgtggcagcccctacaaggagtcgaaggtcgtcgagatggccgcaagcgaacggtaggcaacgttgagtaggccatgggcgacggtggccggcggcggcatggacgacgacgggccttcggcggcggtggtggaggacgcgggtccggcacggccgtgcccggatctggccgtcccgtggctgattccaacgctcccgcgatggcggcacggcagcaatggcgttggcggttggacagcggggaggcagctggtggcgggactaagcggtggtggcggcggcggcgacgactggtggtggtggaggcggcggtgggaccatccagatccgcgccatcccaggaggatctagaggggtagcggagggatggtggtggcggcagagcccgagccttggcgggtgaccagcgatgcgcgacacgcatgccaggttgcgccggtagcgatggtggaagagacgacgtggcgacccaacggcctcggcgcggcgtagccttccctgccggctttggatgtggcggttggcacgtgtggtggacgattggcctctccctcagcaagatcaggtcccctccgccggatttgaggcgagagcgtcgtgcttcggcggacgttccagtgccgcaagcactgtgacggagggtgtcatcggcatggcgtagaggatggcaaggcgacggcagagacggtcttgtggcctgaggatgacgcgggcaacaggatcatggcggagtcggcagttgcattgtcaggggggaactgcggttctttgacgggcttcaatccagacttttgtcctcttgcgacagcgcctttgccaacaaaagatggtcacgtcaggcaggctagtgtgcgggagaggggatcaattcttctctctcaccctctcctcatccaacccaattgcatggatggagctggagcgagccggggtcgagctcctcaacgatgattggctggcgatgtggcgccggcgcagtggccgcgtgttgaaggctttcgtcgatgttggcagtggaccgtgcagaagcttgttcttgggagggttgaaaattatgggtgaaagttctgccttcgggttggcaacaacgacgcctgagggcgccattttcctcttgtggtgttgctgcattttctttccctctcaattactttctttaggtgaaaaccttgtcctagctctctgggacgggacacaacggtgctattggtgttgttccctttttggaggcatcatctcgaagatatcatgtttcattcttgctgcgggtgttgttgtagacacgcgttgtggttgttttttttcttttttgactatagtcttccaggactatagaattgtatttttctcctgctatatcaatacttgaaactcgtattgtctcgtgcggtttgttaaaaaaatatatagataaaagtgatatttgggggtagttttttaattttctcattaaattaactgtgggtccaccgtgggccgtggtgcgggcatagctgcacacgcggcagttgcaaagtccgaaaatgggtggttggcacgaacggtacggacccatctcaaatttagtcacgtttcctttgtcgctttcgctgtcgctgctatatgcttcaatgtgatcatcgattaattaagcagcttaattttgttctagattaatcgacgccctttgccgatctaatagtcctacgttaatagtcctagattaattaagcagcttaattttgttctagattaatagtcctacgttactatgtctactgttgttgtacggttttctgaatttctgtcatcttttgaggctgggagaacagaatagtagagaaaatagctccactcaacgaacttggctccaacggcgcaaaaaaatcttctttatctgtttgttatttgacagcctcttgcggtttaagaaaaaagataatcgccacacgtgccaattattaactttcacgtgatcaaaatatcttactgaagcttagatataacaacaaaccaaacaacctacttcactactcgctctgtccaaaaaaaaaaggcaaaccacggatttccgtgccaacatttgattgtccgtcttatatgaaaattttttataattagtatttttattgttgttagatgataaaacatgattaatactttatgcgtgacttatctttttaattttttttataatttttttaaataagacagacggtcaatcgttggacacggcaaccagggtttgtcttttttttaggacggagggagtagccacttgtgactatggctggctgcagtacagtacgtacaagccaatataaattttactgtatttgttgtagatgttgtatttgttgtagatatactacgtccaccaaacacacacactagaactccgacgacacatgactataatgagctagctcaacaaaccattggttgtgtatatcctagatatcaggcttttaatttatttatttatttattaaaaaactcaacaaaccacagtgatcttgtctgatctgttgctaacatgataacctccttgcggccccgattaaaaaacagccaaatttaccaattataaaatataattaagttcataaaactaccaaatttaccaattataaaatatactccgtaattaaattattaagctcatgccatatattccgtacatgaagaacattatctaactttgcacatatacgataataaaccaacaatccactaaaattatgattatatgcgccaaaatgagctagcttaaaaaccaaacaacccactaaacctcaaactatggcccgttattttctccaacaaaagtcggatgaaaatttgaatattcgtggcatgcttttcaaactgctaaatggtgtgttttgtgcggaaaatttctatatgaaagttactctaaaatatcatataaatatatttttcaagtatataataattaaaactcaattaatcgtacattaataccacctcattttacgtaaaaacacttaatctttatttttatcttcatctacctgagtttcaaacaccattaatgtacaagttcactagctccatttgataaatttgggaagtgtggttatggtaaacgagggagttgcaaaagcaaaacgagctttcgaaccagagaaaattccttgtgtacacctcagaactctctcaatcccttctatgcacctgaaaaataccgaatcccttgtgtgccctcgaaaatttgtttggaacccttgcgtacccctcccgtcaagtttctgtcagtttagatgttaattttcttagaaatgtccattatgccctttgagaatggtggatatgaaatttgatcatagttggctgattaaagagctccctatatgttgaatattttttttcatgatgtgtgctttatgatactaaataatcagttgatagaaaatttaaaataaattttgagaaaagttagtacactgcaattttgaaaataaataagtggatatagctagctgaaaatactaagattagtacattgcaattttaaaaataaatatgtggctataactagctgaaaatactaagattagctgaaaatactagatttagtattttcagctaatcttagtattttcagctagttatagccacatatttatttttaaaattgcaatgtactatttttttaaaaaaaatattttaaattttatatccactaattatttatgatagcacacatcatacaaaaaaattatttaatatatagcaagctctctaatcagccaactataatcaaattccatgcatgccctccattctcaaagggcataatggacatttctaagcaaattaacatctaaactgacagagacttgacgggaggggtacgcaagggttctaaacaaattttcgagggcacacaagggattcggtattttttaggtgcatataagggattgagagagttttgaggtgtacacaaggaattttctcttcgaaccaagcctagtcaaatcatgtggtgagcttagctttcacctctgatccaccaactaatcatatattaaaacaacacaaagaatatgtggaccaagttagcaatttggattcaaaaaagtttttttctgagtaaagtgtatggacggtccttaaatttatagcggtatgtcatctaggttcttaaactctcaaaatgcatatacaagttccagaacttgtcatagtgtgtcatctagatcccaaatcgccacagccccttcaggatcctacatggtgcttgtggtgctgatgtggcatgtcacacggacatgacgtggcataattttgactgacaaatgggacccatttaaaaattttcttttttcttttttttcttctcttgtattttcctttcttctcctttctctgtgacccgagcaaaagagaggaaaaaaagaagaatgagaagaaagcggaaaagaaaaagaagaagaagaaaaaaagacatgtcacgtccatatggcaggtcacatcagcgccacgtaggatccaagaggggatgtgtcgatttgggacctagatgatacattttgacaagttctagaacctgatatgcattttgagaatttggggatttagatgacacaccgctacaagtttaaggaccgttcgtgcacattactcttttttcttgtggaaaaagagctactcgtttgtgtcccctccttccaatctgttgctaacatggcaaccttgtaaccccggttcacaaaaaaccaacacattctggcactttgggcataactaaggggttgtttggttcttaactaacattgtcataactcactttaggcaatgttaggcaagtgtggcttgccacactttttgtggcctacaaattgtaagccacacttgtggcaaagttagacaaataattgagtctatgacatgtggggtaagatggtaagaaagtgtggcttgctatatctatggcaatgaaccaaacacaaatctaagaaggtgtgacagtctaaagtgtagtgtggcaatttgaagtagtgaaccaaacaacccctaaggtacgaccttagtatgctcaggtacgacgacaacaaaacaagcaatccactgaaactcttaactacagtctacatgcgccaaagtaatctatctcaacagtcaaacattccactggaccttacaatacatacaccaaagagagctaactccagttatacaataaatcaaacaaactatgactctatgagtcccgtcggttagcctaataaaccaaaataaaagtcaatttgaatcctcaaacttaattttaagatattttcaatataatttctttcagcgttggcttttaagttgctacaaatagatatataaaagtttcacctaaaaattaatttttattccctaagggcaagtactatgggcatccaagcacaatttcctagattccacataagctaaaatagtgaggtggaggagagaagagatgagagagataagcatccacctctcatgcaagaggcaaccgctacacaaaattcaagacaaaatgacagagggaaagagtagattgggcaaacaaacattgaggctagtgtattagaattagtatagatgtgatatattgtacatgttatctctatatttatttgttgatgatgtggtcaaaattagatacaacatccatctcttttataaaacttgccctaataagccattatggacaaccaatgaggttctattaggcttcgcaccacgtgtcctgaaagtgctagttacagctgtacaacgggcaattaagcgcacacttaaggaagagtattagagcgtgtttgtcatgatatgaaaaagtaaaagcatgggttgccatctaaaaaaaatcttcaatgtacactactttatactaagtgtttgtttataagtttagtgatcaaatcagaaaaaatatgtagtgcaaaccacatatgtagtagaaacttggaaactaccgttggatcgagaaatggacgtccgagattcgtccacgtcaccatgagttaaaatttaactctaaccaaaattttaactcatgagtgaatccgtgagtgaatccgcgagttaaattttaactcatggtgacgtggacgaatctcgaacgtctatttctcgatccaacggtagtttccaagttttcactgcatattttcccatcaaatcatgtgttaacccttagcttctagccttctagtactcaaactttcgctactgttctaccagaacgccatctgactacatgttagccaagaacaacacaaaaatacatagatccaagtcagctatttcaacaaacaaccaccacattctgccaattacaaattaaataaagatcattcctgatttcgtgcatgtgagaataatggcttgctctgctcaggtacgacgacaaaccaaacaacccactggaactcttaactacatgcgccgaagttagctagctagctcagcacaatccactggacctcactacctcagactacatacaacaaatagggttatctccagttgtaagataaatcaaacaaggccccgtttagttccccaaaatttttttccaaaaacaccatatcgaatctttggatatatgcattgagcattaaatatagattaaaagaaaaactaattgcacagttaggggggaaattgcgagacgaatcttttgagcctaattagtctatgattagccatagatgctacagtaacccacatgtgctaatgacggattaattaggctcaaaagattcatctcgcggtttccaggcgagttatgaaattagtttttttatttatgtccaaaactccttccgacatccggtcaaacgtccgatatgaccctcaaaaattttcatttcgcgaactagacaggccccaaaccgctaggcctcactccgcgtgtcccggagagctagttccagctgtataagatgcaattaagcccgtagcagttaaagaggaatattgaagcgtgtttgtcacaatttataaaagcaaaagtatgagtatttcttttttgaaaaagcttataatataccctatatacaagtaaatactaagtgttcataagtttagcgaccaaatcacgtgttaatccttatactccctctaggttgataatatttgtcgttttgaataatggcacggtctccaaaaaaaaactttgaccattattttctattataatatgtataaaagtgttaaaaaatatatgatcttattaaagtactttttaagattaatctatacatgtagtcactatgtttgaaagacaaatatttttaaaataattcataatcaaagattttaaagtttgacctcacccttatctaaaacgacaagtattatcaactcgaagggagcaactactcaaactttttagaccaaggccgccaccgactataatgttagccaacaacaccacaaaaatgatacgtggttccaagtcagcagtttaaacaaatgtcctttattttatattttttagaaaaaaagaaaatggctgcttgttcgcaccgcttccttcctaatctgtcgctgacacggcaaacccgttgcatccccggttcataaaacgaccacccacatgtgttaattataaaagcccattttaaatgattaaattaaatcctaagctaacccctctcgtcacactaaacaaaacgccctcagaaccagaagtcttcagttgctttccacgccgcgcgtagctgcgcatgcgtgtgcgtatgattcggaagatcgttccaatccctcctatataaaaaggcgtaacccagaacccagaagatgtgttctactgttgttggagttggaattggaattggaatttcttgatcttctttaattctttcgctttctctttgttcactttctttagtttaatcctcttgttaaggaagcataaaggattttaggatcgatcgagggggacgagaaactcggggagttggtttcgatggcgctcagcacggccttcagtgcgctcccgacctcgccggccgacgtgcgggtcgtcaccgccgacgggagcggcatccgcgcgcactcgtctgttcttgtaagcgaaggaagagatcgccgttgcttcgatgcgatttttctcgttcttgtttcgaatttctgatgaatttcgctttgtttttctgtttggaatctggtggtgtgatgtgatgtgatggcgaaggcctcggcgtcgccggtgctggagcggatgatcgagcaggcgccgcgcggcggcgtcgtcccgatcgccggcgcctccaccggcgccgtcgtcgtcttcctccgcttcctctacgccgcatccgtcaggtttgtactagtaggcaaccgcacgtacgcgcgcgatcacgcgaaagggaagttaacatgtgcggcggtgtggtggcgcgcaggggggcggcggcggcggcggcggcggcggagtgggaggaggcggcgctggcggagcacggggcggcgctgatggcgctggcgcacgcgtaccgtgtggcgggcccgctgaagcggcgcgcggaggaggcggtggcggcgcgggtggcggccgagggcgcggtggacgcgatgaagctggcggcgctctgcgacgcgccgcgcctgtacctgtggtgcgcgcggctcgccggcagggagctcgcggcggtccgggagtccgagggctggcgcttcgccgcgcgccacgacgccgcgctccgggccgacctgctccagctgatccgcgacgccgaccagaggaaggagaggtgggggagggagcggggctcccagggcgtgtacctgcagctcagcgacgccatggccgccctggagcgcgtcttcgcccgcgccgcccacggatcgccaccgccgctgccgccgccgcgcaccggccagtgctgcaggatggcctccccctgcgcgcaccggcggggcctcctgcagctcgcgaggcacttcttcgccggctgcggcaggagagtcgccggaggctgcacgccctgccggcgcttcttcctgctcctccggctacactcctccgtctgcgacaagtccgacgacgattcttgcggagttcccctttgcaggtaaacaataaacaaaaataaaggataatcacacatgaagaacagctaggaaatatccccgtacaaatttacagtacgtgtttgttgaattggattcatcgtatacgactctaaactcctactctatatactggagtactatatggatgttaaaagtaggattaaatttaatatttaactcatttcttctatttctatatatagacaattgtactttgcatagctatcaatttacactgttataatttggtccatcaagatcttacggctaacttttttctattataatgtggtaatttctaagtctatacaacaaacatgatgccttctttcggcgctattttataatataacctaataaaacctgggatggtccttgcaaatgacacggtgctagatttttaaggctagatttttaaggtatgactgaatttgatatatataacacttaaattatattccatttcaatagatacaactgtattttctactccacaaatttaaatgaaatatatttcacacaactcttaacttttatgttctatagatacagttgtacattgtatacgatcaatctacacccaccaagatctaatgaatcaaatattttccttcttctctgactacctaagtaatttgtaccctttttttctagttgtttttataatagatagatagatacatattattagatagatagattgattgattgatgccacatgccattgccatgtcaaaagctaataatgaacccttccgttcatttgtttacgttcttccctttgctccagcaacttcaagactaacatggaaaaagggaaagtggacaagacatggaagctccttgtgaagaaggtgatgagagctagggtgatgtctgcatgggccaagaggccggtgccagcgccggagatagtgcagaagtcatgggcaaagtacaacagcagcagtaggagtagagcagccagattcagatagatagaaggaaaaaaaaaatacagatttgatacaagttcaggaaggcaaagcatagttttttttttttttgggtataagcttctttcaggaaaaaaggatttagcagtctgggaggacattcttttgttgtattgctcctgcaaatttttgagaggaggaaatgctgaaattttgcaacctgcaaaccgcaatcaaattgtgtggccagttctttaccaaccagcttgtatacatttgtacagtgcagagttcggcccgtactagtcattagtacatgtgtatccaactgctactacctctatcccataataagtgcagccatgagttttcacgcctaactttgaagaatgtataaatcagtagcggagtagccgtattaaagtactactcccttctgtctatcaatgcataaatcatgcgtaaatcagtactagcagtattatgtagtactatcagttgctgagttgcaacaagcccaggtactgtaagtagacctcagttttagctgcttcaccgacaaatgctatatacaagctacgagtctacgactaacaaaacaagccgtactaaccatctgaataattaccggtagagtttgtgtgaacaacccttggtcaagtcttcattgactcctaagtactacggagccctagatgaaccatgtgattgcatttcactaacatcaatgacactttttttactattcagattgccacatcctgtaggatagcactggtggcaccagaaatgaggatattcagattgaagttccctcatgatcattttcatttctccttcgaactttgaaaatcctaaaacccaaaataattaaggagcatttgcagtgctatagggacactaatctttgcttaccatttctccatcaggctgcagtttagttatccatgatcagtactactgttcaccagcggctttacaatctgcaaacacctctaaagatgaatgcagaaaagggaactagaaagtataaaaaagacttgtatttttacccaacatatactaaaacagtttcaaaactacaaaacctgaatactccttacaaaacctcacaaaagatagaactatttctacaatcataagggaattctatggtcaggggttgcaaaatttgtgtgaaaattgctgcacacttgctaggggacagattaaacatgagcttaggactagccattatatccagcgccatcaaggcatcaagccatcaacatcacgctaaggatccagccggttgttcctcggctcgtggcgccgcgcgtgggcgtagtccctgaccatgaaccacctcatcttcttcctctcctcctcccactccctcgcatgctgcctccttccgtcgtcgccgctgccatggaggaacccgctggctgctgcgccttctccttccacggaaagaacaagatcagtttcatactcttccctccagtagcaatctcactgaatgctcttcagataggcagtagcattcataaaagctggcagaaagttagtagtagtagtaaaacttaccaacaagaacttgctgatgaatcagagacctgaagctgaggaggaagatgagagcaaccaagctcaggagaccaaggaacctcatcttgctttgcctctgcaaattaattaccttgcaccgtaacactgagcagttgtggctagagcaatggatatataggccatgcctcatgtcagagcatttcagagtagacagacaggtcaaaaagatagtaggaaatttttggtggacacctctaccatttggcctctctttgccttggttgaatttcattagtgttctcaagatgtcctacgagaagaatctcttgtttctggagctcatcgatgagcttaaaaaaaacagagagagaaaaattcgagcctttcctacgcgcggttgcattctctttttttcctggggccaagagcagctgcagagctagttttatccctacgagcctcggcaacgtctccccgtgcgagctctgtacgctatggcatttgatttcgtacgtgtccacggcacgcactcggaggagtcggaggatcatttttcttggggagggattaggaaagctcattgtgttttgtttggggtcttcaacgaagcattgttttattttggcagaaccaagtagctatcactataactcttcattactcattattatcaatttctgccgcagaaaagaaaaaataactcatactatctccatcttaaaattgaaactcagtactgcatggtctaggaggaagaattaccgaatgacatatagaaattggcattttaggatgggcaaaatataatttatctgttttaagataagttaatctagtatgatatgtgacatatcttattactatatccgtggacaaaattaacttactccatttctgaagatgaagtactccgtattgctgaatgacgggcagaaatcgggccaagtaggggtcattttcttcaggtatcagctaaaacggttggcattaaaacgggggaaaaaaaaacgatcaccctctgtcacatgggacccacatttctcaaccgggaactccctgcgtaggagtacgtcagtggcgcccacacccgtgccggagaccgcagagtggacacggtggcgtcggtggcggtgtcgcaatcatcccgcacgccccccacccccacaaccccacaccaccacaccaatccgaggaggagcaacaccaacaccaataccaacgtcccccaagtctcctcctactcccggccgccgcagcctgcgtgcgtgcgtgtgcgtgcgagagcctacgcctacgacgccaaacacggaaaccaccacgcacgccgagacaaatcccacgataccccgagaaaagcaaaagccaagcccccctctcactcccttctcctcccgccgcgccgcgccgccccgatacctcgcttcttctacaagcttccattcctcggtcggtgccggccgcttcgggcgcgcgtggaggtggttgctgctgctgctgctgctgggggcggcagaagctagtggcggtgggtgtgggatgcccgccgcgacgccgacccgctctcgcctcctcttccccgcgttgcggccgcggccggtggtggttaaagcggacgggggaagcctcgccgctgccggtgactgactggctgactgaccgactgcgccgccgcggtgcggtgggaccacgcgcgacgccatggacgccgcctcccgccccgccgtcgtcatcgacaacggcaccgggtaagcctccctctctctctctctttccagatctgcgcgcggagagcgtgcgccgcggcgaatctgaggcgggtgatgagaatgggtggcgcgcgcgcgcaggtacacgaagatggggttcgccgggaacgtggagccctgcttcatcacccccaccgtcgtcgccgtcaacgacaccttcgccggccagaccagggccaacaccaccaaggggaactggatggcgcagcacagcgccggcgtcatggccgatctcgacttcttcatcggggaggacgccctggcccgctcccgctccagcaacacctacaacctcagctatccaattcacaatggccaggtttgtgcgcgcgcgcgcgagcgagcgttaatttcctcttctgacactctgcgttgctatcttagtttgcggagcttcatttactcaagctgatatgggctagatattcaggttgagaattgggacaccatggagaggttctggcagcagtgcattttcaattacctgcggtgtgatccggaggatcactattttctgctcaccgagagccccctgactcctcccgagacccgcgagtacaccggggagatcatgtttgagactttcaatgtgcctggtctgtacatagcgtgccagccggttcttgccctcgcagcaggatacaccaccacaaaggttagtagagcaagaattccttgagatgagaacatgaatttcgttctcaaggccatgtttatgttgtagttgaactgttttattacacgctttcaatatgcaatatttctgcttaaccttaatttgataggtgaaagagactacattattgaaatatttacgtttccaataaattttaattctatagtggtttttctgtttcatttgaaagctcattgtgttggcatcttatttctagccatgcatggactcttgagcttcgtagttgtgcttagtttgctctacaatactccttccatcccacaatactgtctttctggtttgtttagcacaaattaaggtttagcaatcaaagactaaagtgcctctcatttgaatggaattgtgaggttgttgaggatagaatgtgtagaaatttgaataggaggtgattgattggacatatagtactcttaagtgacaagtattgtgggataaattttaaaccctaaagagacaactattttgggacggaggaagtactacattatttgcccctctttttcctttcgtctatgttgagagatatatttatgaggaatttcatgctttgttttcagtgtgaaatgacaggtgttgtagtcgatgtgggtgatggggctacccacattgttcctgttgctgatggttatgttataggaagcagcatcagatcaattccaattacaggcaaggatgttacccagtttattcagcaactcttaaaggtagttaccattgctttcttgtgggccgtcacaagatagtacttaaccttctatttgtcaacagatgtcactgatcttacattactgtggatctatgcctttgagagtccaaatgtccatcataactgcacaaggaaatcaaagattcatgaaaataacagccacaaataatgaaagggataaaatgcatgaaatagaggtagaattggtggaaagtaactgtcaatttttatctaatgatgcacaataaattccactcaaagttttacaagcaactccagcctgcagctgcaatcatgcgccatggcaaattttgtaaacacacctgagattatttgagtcacctcaccgtggttgtcaaataagcatatcaagtatatcattctgaacaaatgaatacacatggttaagactagaggacaagctgaaattatcgttacctgtatgtgatgagagagacaacttctcttcttgtgccatttaacctgcatgtgaaattgacttgggacttgggagtgtgatatatcaagaaaggatatataaatatataacaagtttacctcataattttcttgagattttcatattttatatagcgaatctgcataatggcagtgcacttataagtcactgagccaattagttcttgcaggaaagaggtgagcacattccaccagaagaatcttttgatgtggcaaggagagtgaaagaaatgtactgctatacatgttcagatattgtgaaggtattaactactacaataaatacatgaactgtcaattattgaaacatggatagtatatgttctcgtttattctaggatgagtgttacttcaaaaggaaggattgcttttacctcataatagcattgcagttgactgactgtcacagttatagcagcctaggcattggcatttaaggcttaccctgcctggaatctaattttgtaaagcactgttccagcatgcttgatgtcaaacaatgcatctgctttcctctgattcactttttcctgcaactggtgattgttttcagtatcgaatatgttgtctcggttcttcccagctttgaaccattgactttgttatttgtacgacaaaaaatagagtccctaagagatgaaaagaaaaataataatataactttattgttgcctttttaggaatttaataagcatgacagagagcccaataagtacataaagcactggagtggcatcaaaccaaaaactggtgccaaatacacctgcgacattggatatgaacgcttcctagggcctgaggtaattgattttgcattaatgtgttcaccattaactgtggcttctacaatgtaacatttgatttaggttcaaaacttaactgcgatcataatttaactccaattcatggataaaccagtttgagttcaggctttatgttcataaatataactgctttgtacatgatatctctagtagttctgatgcattttctaactaaacattttgattgcactatcattttaatctaatttccccacgttgctgtgaaccatgcagattttcttccaccctgagatttacaacaatgacttcaccactcctttgcatgtagttattgacaagtgcatccaatcatccccaattgacacaagaagggctctttataaggtttgtgttatcaaaatgccgtcttatgattcaaaatatcacagtggttctgagtttcattttattggacagaatattgtcttgtccgggggatcaactatgtttaaggatttccacaggaggctgcagcgggacctaaaaaagatagtggatgcacgagtccttgcatctaatgctcgacttggtggagatgcaaaggtacaaacttttcatgtttgctctggctctctcctgattgcagaagaacactggccaaaccagaaactttattgtgatattggaacttggaagctacagctacattctgtttatttcaggcccaacctatagaagtaaatgtagttagccatcctattcaaagatatgctgtctggtttggtggttctgtgcttgcctctaccgctgaattctacgaggtattcaaacttctatttctatgtacagtagtaatgaacactcatatcacttgaaactagtgcatagcgtttacttttgcaagttgtttccaaagcttaaatttttttgttggaatatatccccatattcggggtttctttttcctttttccattttagaaattaaagctaattctggtagttttcccaaccaggcttgccacacaaaagcagagtatgaagagtatggcgcaagcatctgccggacgaatcctgttttcaaagggatgtactaaaccacggcgcaaagcttctgtagacatcaccagtggcacccccaacgcgatccagctgcactgcccagcatggtacaactgacgttggggaccgagggggatcctgcagtagcctcgctgttatgagttgtacaaatctagcaggcgcatagatagatccactctttcggtaatacattccacatgttcatcagtttttgctagcctagcagcaaaaacaatatgaccgaacggcatgggcaaaatatatgtttcatgctgctgtataatctttgttggtgacggtgtagcattacgacattgttttttttgttggtgatttggttttgatctttgtatgtctcatgcttattacgtagtattaactccattccgaaatatgaaatataagggattttgacgatacaaataaatgcatagccaaaatttcttatattttgggatgaagccaaaattatttatattttgggatgaaggtagtagtcaactggtcatgatcactttgggatttcctaattttgacgatacatataaatgcatagccaaaattctaaaattccttatattttaggatgaaggttaactagtaataatctctttcctctgaattgctccgggatttcattttttagataatggaatataatatcccggcctttgcttaaaaagaactacaaccaattattacaaagatccactccagaagagagtgttagttcaatacaagttgaacacaccaaataagagaagagaggacccaaactgagaaaagcaaaacaaaatgtggagctagaaggccttgtcaaggcctaggactgaagtttgaagccaatgcatagaccaatgacaatatccttgcacgaagaggtttctccaaagcgatgcccccaaggaggatgcgacgtggatcgccgccaccgcttgtttagaaccgaagcaaggttttcacccggagaatatggtagggaaaggaaaggggtatgctaaaacaacgcctccaaggaggggaacgacgccaaacggcgtcgccgttgtcagccagccaaatggctcggcaaggctttcgcccgcgattccctgtccaaacccacaccaccaatccgcacaagaaggatcgtcgtcggtcaacaacattatcccttcagcgattcggccaaggccaccacccacagttgttcctgcccacggttgctccgggatttcataatttctgactcttacttatgtactgcaagtctgaaattgcaggtatagcaaagatttcaaggcttgattttgttccaactatagctaattttgataagactgcctacgtgatgagtttgaaaagaattcaaccatgcaatgatctcactgctaaccgtgcaatatgcagaatgaggctagaaatcaagaggctaaagccacacacgaacaattcagaagactcggtcaggacttggctgcaccaacaattcaaaatgcaagaactaccaacaaccacactgttacttcagagaagaaccaaaggtaagtgcccctagtatttacatcgatgctaacatttgagttcctcctatgaaattcaggagggcatgctaaccacagatcacagaatatgtcattgcaaatggtcaccagaatgctggttgaaattagcagagatcgatcgggactcgctctgggttctgagctctttcttgaccctcagagagcttgacaccaagctggcctttgatccctcccccaaaggcatacagtttaccggattccatgagcgcgaacgtatgcgggtatcccatttctgagttgagccaatatgaagaatttgttgtgctaatctgtacagccttatcattcaacaccttcagtgattctaccaagcttggggtagaaaaatctgcatcatctgctgcttcctcatcctcctgacaagaagcatatcaggtagaaattctttatttttcatatcatggtagatattttgcaagaatgaatgtgatagaataatgatctaacctggaaacctatattcagggattcagcggatccaaaggagtatgtatcgccgttatcggagacaacaaaggtggtgtattcaccggtggagacatgcacagccttcacattgctcaatccttgaaccacagtggggagaaccctgtactcctcatcgccatgtcccaaacaaccagtatggccccaaccccaggtgcagacacgcccatcgtcacctagagctgcagcatgccaagtgccagccgcaactgaaaccggattaaagctcaatgtcaggaaatgttcaatcaacttgggggtgcccttattgtttttgcatccgtgaccaagcttgcctcctaaaccacagcctacagaatacactgacctgcaaagtagttagcactgttaatcgtctcaagagaagctccaaataccaagcactcaaatttgtttcaaagattatcattcaagaataaatgaaaagttggcgcaagagcaaaaacttacattccagttggctggtaggccaacataaggagatagcaattcccagcagaaatctgtgcaacaagaacaccctcaagtggtccagagagaagacgaggctcaacatctgaaggatccgaactatggccaagcctctcggttcgcccccacgagatcgtgtaaacctgaccctctctagatagaaacgcagagaagtaaccaccaatggctgcttgaactacaaacacaccctttagcgactccactatcttaggagtggtaatgtgatcagctgcatcagaaagctcttcccacacaaagctacccttcccaaatgcatagacacttcctgtgtcactcacaagcattgtctgccttgatccaactgcagcctgtgtgattttgatgctttgcaaagacctaacaagaaggtgaacgttttactacattggtaaacaatcatatattttatcaatatcaacacattacctaataaggcatggcttgaaccgatcttcagtatccccaaggccaagctggccccagcaattagccccaaatgagtatgcatctccctttgtggtgacaacaatactatggcccggcccggcgacaatccgagagtaattcctttctctagccacaatatacttgaaaacaagcttccaagatccaccacacctctgcttcagttgctcccgttcctgctgtgccattagcttaaccatgggtcttttatggcacatatcaaatgccgcaacctctggaagcgatagagcaaagtttggctcgaaatttgcaggtttactgaagaatgtacatgtagcctgaaacgacagacatatgagaagctcatcagtagcagcagctcctgctaaagcattgagacagagagagcatagctgtagaacttgcctccagtgcagcgagatctttaggatctagctcgcaggtggagagcacatgtagcacaatggaggggctcacagcaagggggaattctcctggggtttcatgaccatagcaatggcgctgcgaacgttccagcgccgtgtgcagcggagatgaatgggagggtggctcatcaacaatgccatggaactgcatcacaggcgaagttccacttgcagctgcgtccattgggcactgcatgcttcttgcagtgcccctcgctgtgtggataaataggattatgggagcagagtactcagtctgacaagaataaaagaagagaggcaaattactactacttcacattatagtgcaaaccccggcatcactaataagcaaatcatttgcaatggaggttaaattaaaggaagcattgaattattcgatcatgttggcagttcagtatttctaagctgtgttctgcagtagacagagtgacatattcgtcagatagcgcatggacaggagaaagcctgaacctcaatccaaaaacaacaacacacatgaacccttgttagatcaggaaccatcttacagtggaactcaatactactaaaaacagttaatagcagaaacaacacaaacaacacataaaaaataaaaattttcattcagtagtaaattagcaaagcctttgcccccacaaaaagaatgccatcagaatgaactgcagatgagactagcacgcacaagacaaatccatggattgaccccggatcatgccaccaaagcaagatcaacgcacagatcagtctccaccacaatgatctttctctccgctcatctccgacacgatcaacagatgagaagaagagcgaagcggaaacaagaggatcgatccatgatccgatgatcgtggccacacagtctacagttccaccatccccgatccccgcgcgcatcacaaaatctcccaaatccgccgcctcaaattcccccattacagcatccgaatccccccaactcctatcaaaccaagaacccaagaacaacaacaaaaagcaacctttcctatcccacacagatcggctcaacaagatcagaaaaaccgatccaattccaccagattccccctcacccctgaactccttatccccacaaaaaagaaaaaaaaatcccccaaaaatcctccgggaaaatccagattgagggccggctcagctgccagtaaaggaatcaaaacagcacggaattgagcaaagattcagtgtccgatcgttcgtactggagaattcgtctggtgacgatgggttcatctgatcctcgcaaggctgcagaggctgcaacctcggggaaccggatgtggggggcggtggggaggaggtggtcaccttggaggagaaaagagaggaggaagaggaagctcctcgccgttatatagacgcacgtcagcgggcgccacgtcagcgtctttcgtttcgttccgttccgttccatatgcttctgtttccagagaatccagatgcaacggaactacagatgcgatcgactcgactcgagtcgggtatcccaacttcccaaagcagttgatttttgttgaaaaatcgggtggattaggacttggatttgaagcgtaagaatttcatgtagggtcatagaaatttcatatattttttacattgtaaatgggttttaaataagacctagacagtgtatggcaaatgggaaagggaaatgatttcctacccatctttgaatcctaaccgttcattctccctctttcatttaatcctaacccttcgttcatttctcaatctcaatcccatcccttatttaccattatccaaacacacccctaatgtatatgctcgaagcatataggacaggtgtgatgcacgcgaccaatttagtgtaatttgatcacacacaaaactggtaagttgaaagaaagggaaaaaaatcaccataaagcaagaatgacaatataggcatgagtaacttactccctccgaaaaaaaaaaacaattctgaatttgaacctggacacatgaatcttcaggttcaaatctagaattgagttttttgggacggaggtagtacacgatagctatttataatatttctatgttataccttggcgacgtctagacaactcattgacaatttctttatttgtctatctcaaataaatttgaataagagtgaactacaatttagaccatctattattgccaatattttagtttggactattcttgaatcaatcttttcatcttcgacaaataatttgccattttaccattttggactttggatgatccaactctctattcatccatgtcaaatctctgatctaggaaaaatatggcatgcacatagatgggaaagttcgcctatttatttaaagccgtcgacatgtgcttaataagttgtttgggatggtctaaaatgcaacaatggcagaatcaacaggtccaaagtgttggtttacgggtgatctaaaataaaattttggcaattaaatatggcctttcaattaactatttgaacaattcataattggaaattgatcgcctgttaaccaacaatcgacaatcttccctcgtctatttctcttttcttcatatcataaaaaaatatacgtggcctggtatctcttttaaggtattaacatcataacatttttcataccttaacacgtcttcctgttctttcagctcaaccatttgcttaatttatttacggagatatataaccacatatacagtcgggctgctgtgttgtaccgtgaaagattgggactaaaatcccgaacaccgtcggtccgtcgccgtgaccttcatcagtgcgcgtcggacgcctgatctgatctacaacgaaatgccagtgccctcgctactaattaaccacacttattataatggtctgatgatgacatcttacttggttggcacaacctgtccaaataacaaaaaagaatacagctccatgcatcctccatgttgctttcgcccagcaaaaggcgcaaatggatccgagcaatatgtgtcgtgcaggtctacacctgagctttaggataatccgcgacggcaccggcacggagtgctcgccggcgtcagcaccctcacctgcctaatgcatgcgcatcgatcgcaacttgactgcgaaatggcaagccacattaacccaaaccaaataaccaactagccgtccaaattccatgaagaacccattcagcatagctccagcttcaatttcacataaaaaatatggagctggctaaaatgtactcacaaaataaattaaagagataagggctaatgagctggtgatcgcccacagcaatcgccccatgtccctacccctaacacacgctagtcccccttcttcccttccaactgcatcataaatttcaaaaaagaaaaacaagttaggaagaaaataaaaaaaatagaaaaaaaatctcgaatacccataaaagtatatctatgtgcatagactttatacttataaatatataccgtaaacttcgtacttacaaactttatgtatagaaatattctatataaaaaaatttaaatctgattttgaatttgaatcgggtatataaacttttaacttataaattttaggtatgtaaactttgaatttataaactttaggtacataaacttacccaaaaaaaactatatggtgccaaaaaaaaaaaaagaaagtggtgaaaaaaaaacccgatcgatccaccatttgacacaactctagctccatctccatctctcctagagctgtagtccaactaaacggtttcaactccaacaaaaaacggagtggagctggctagagtgctatgttaaaatgaagtagagaggtggagctaaccagagtaccaaacttctggagttaaatttaggataccaaacttttggagttaaatttaggagttgaagccctaccaaattgggcagctccacagctccacaactccactttaaacctagtactcccttgttctcaaattgatcatcatataattaaatccaaaatttctcaaattgatcatcatataaataaatctaaattttctcaaattaatcatcatataactgcatggacacgaatttcattggaatatatttaatgtagcaagggagaatgtgtgcatgctaagggtataattggtatggtgttttaatttgggcatggtgtcttgattgatgcaacttaaaagggcggcaaggggcctagatgcaaaatctatcagccaaatgctttttctctgctatgttcataataattaaataattatttattggtaaaacttgttaataatgttttaaaaatatattgaagtttgttgtttcgcaatttcatctgttaagtaagatattaatctgtaacttattcgacgtattagtgtacgaaattgatataggcctatcgcagtctcggtcatagaaacattatatacacttaaacaaggagaattatgtaacatgaagatatagtagtagaatttgaacatgatacatctggttccattgcggttacatagataatattagattcgaactaggagggaggtagtgcaagagttgaacacaacgacgatatagtaatgggacaaggaagcatgacattacaaatttcaatatggcaagttgtccgataatagctaacccctatgtgagaatctctctcctctctcaaaccgcgctttagtaatcctatattcctctggtagttcaagctacaccgcacggctaggtggagttagaactgtctatccattctctgtattgacatctccttggtggttcttgtgagaaacgaatagatgtgaagcgaacaaagttagtaaatgttgtgagaaaataagcattcattataatcaaaatattcttaccatgaaatcgtcgtcaagaatatttggataaacaaagaaccttcgacccaaagtcgtaggctttatggaacgaagaacctgataacgatcaccgcatctgtatcttggacgggctttccatggagggagtgccgtagttagcacccgccagtcgcactgttgttcacgacattgtcgttcgtaagctgcttttctctgcaagtattgcttagtacttttggatgcgaaataccagcgtccttcttgtaaacaagtggttaggtcgagaactggattttctgtatcgacccactcgatgtatccgcaagccgtagtgcgggtctgacgaatagagtagtattatgaagaataaaacatttgcccatacagaatgaataagcatatacagataataaaatacctcacggtcatagttagggcacctaaaaaagcgccttcctcgaatatcaggattcctcgaagccattagttggcatcggtcaccgcataggcagagaggccgctagcactaaggtggtagtaggtatacacaaggatcgctacgccagttcggatccttaacgcccaggcgtctagccattgacgaaagctagtgggatttataatgaagctaatgaggaagagagtactgaatgtgactgagttatgaaagattgtgaggcatcgctcgttatggcgacttatataggcaccaaaaatcgcagtgatatccttgacatgtcaacgttgcggaccatggtaggtacacctgattggcgccgaaagtaagattggacgtatgcgggccatggtgggtcagccattccgcagtcgtatcgcacgcgaataaaggaggttgcatcggtgcgacagaaagtagtcgtgcatgtgccgaaaggtatcatgctttcgtaaaaagtaacagcgaagtttagtgatgcgaaacccgaataacaacaacgtattcattatacaagcatacagtactagcatgtaaagtaaataaacaaagagaagtctactctactggctctgccccgcgccgcaaccaagcttggtcctccgggcctgttctcgcacgtggtcctgggagtacgtgaaacgatccagtggcacaacacgggtagcacgagtgtctagccgcggagtggagggcgactagtcctgcgtctgcaccggcggtgcgcctcccagctgtgaggggccgatgacgtcctctgtcgtgacctggaagtcgaagtcgcacatgtcgaagagcaaggcggaagccaccctgtacttcgacgaggtcccggcatggtccagtggtggaccccgactcgacgtgtcggctgcctgtgacgaagtcccggtgtactgccagaactgtgcagagtgcgaggtcgatgcaactgcctgagacgctgaccctgtagcctgggagaagtgggtggcctgtgtcgtagtgaattgggcgaaacctacacatcgacaacgagacccttgtaagctaagacataaaatgcatgtaaattgattgtcgatgtagtgtggttttttttaagtacctatgggggggcacaacaagaggcctactcgtggaaggcggggtgcgatttaacatataagtagagttcaataatataacagaacataatattacatgccgaagtctaacattacatagcgagaactaaagacattacatgctgaagtttgacattacatcacgagacctaaagacattacatgccgaagtctgacattacatcatgcgacctaaagacattacatgccgaagtctgacattacacgacgaaacataaacacatcgataagttcgaaccaaattacaagcaaagccacatgccaacatataacacaagaactacaccacgtagccgaacgtggcacaacgatgtataggacggggtcaagttgaggtagtgccttcacccgtagggcgagctctatctgctgctgatcctgatagtcctgcctccgccgtacttggattttccttgtctttaggacaatgcttgtaggtgtgcccacgttcatctcatttgctgcagcgcttcaccctgcctgcctccgactcgtccatatcgttgcggatgcgacgagtcttcctccttccagccttacctcggagcttcgatgggtcaggaatattgattacttgatcgttagtctctgtgaactccccagctatgctgaagccataaatctctccactccatgtatgatatattgcttgcttactgagtactgtgacacatatactccatctggtatgccacactccgatgccgcagcaatgacatgggtgcatggcctgtggagcagcttcggctttgcacatgagcaatgacatgtgccgtcggctttgagaacacattcctgcttcactctcttgcggtatatacccgtgcctgccttatcttgacagagtatctcaaacctgtgctgttgggtaccttgcactagagctcgatgtttcatggcctttttacgccactcctctagctttttctgcatgaaagttccgaataaaatgttgttgttcggcatatagggaagaactgcctggaaccgatccctaaaatacctacatgtcccatgtaaaatgaactccactataccaactagtgggagtccacggacaccgcgcatcacccagttgtaaacttctgccaaatttgttgccattatcccatatctagcaccacctgtgtcataagccttggcccatttctcttttggttcatgcagaatccactgagaaaatttccgaatctccactccagttcttctaaccaatgttggactatccgttgggagaggtccaagagtttgaggagggtcaggaacggcgggtgctggccccgccgcacgctgatcactgcatttggctgccaactcatctaatctcttccaaagctcattgaatttttttctcttggttctgattgcatagcctcttgaacatgttcatgagctccttgttcttgaattgcttgaagaaattagctctcatatgacgcatgcactacctactctgtacatcttcccactcaccagggtatcctcgatccatactcccaaactgtaactcttctatcgctcgcagcatgccggcgtgcctgtcatgtatcaggcacacattgggcctcatacaacaacttctgttttaactagtttcaggaaccagtaccagctgtcggtattctcactctcaacaaaagcaaatgccaagggcaataactgattgttcccatctaccccaattgctgttagtatttggccctgatactttccagtcaagaatgtcccatcaatgcagagaacaggaggatagtacacgaatgccatcttgcatgcatgtagagctaagaacgtcctttgcagcacacttttgccaggatgttcaattgaggggaatttcttcactgtgtaagagctcccagggtttctttgttggataacaccaagcaagcgtggcaaattgccatacgaggtttcgtaagttctaaatctcatctctattattttctgtttggccctccacaccttggcatagctaatagtatacttgaatgtctctttgatatgtcggattattgactttggttcatatgtcagattatcgatgacatgcacatacatctcagatgcaacaaatgcacatgtaatgttcttgtggtatttctgaacaccaggtagaaaacatgtatgcttggtaatgactgacactgtccagtaatccttccattttcccttataagcgtgcactctccagggacactcatctttttccttaacacacctaacttcatattgcgaccggttggacttggcaatacaaaactctctatgaagtgacactgcaaaatgctttaccgcctccttcatatcttctgctctagtataaatcgctccctgaataacctcattttctttgtgctcccatctcacactatcctcttcagagatgaccagaccagaaaaatcctcactagcccattcggctggattaatatcgggatcctcatcatctgacgaatcatcttcctctacacgctcgttgtcagaatcctctctctccatttcatccacaatgccactgatagtctcctcctcgtcagccactccactaggttgaatgcccactggagctactacgccaccttcctctggtgcgttgacctcttccacggaagtctccttcacttcagcacttggtccctcgctatcatccatgttcatctgcgcacttggatccttcaggtgaacaaacggaaccatagctagaggccacccgcgttgcaatgcattctccacataccatctccacattcgagagtttcgaactggcattagttcccaataaaaactctcagttgcccgacttactacaatatagattgttatgtcatttgtctgtggatcaactctcaagcccctcatcaaccatccttttatagaaggtacactcctctcagccggtctatcaattccccttggtgttacaataaattctgacaaatctaccctagtcggcccgtaacggacgtttcctgggccatggtaaacttgaaatgtatgtttgttggacatatctgtcaacgaaataactagatcattcgttcatgtaataaacgcctacaacgttgacggagctcgtggctcctcaccgggagaccgctctggcccccctttgccggttcggccgggggcttagggtgaaatcccaagctctctcggtatgtggaaagatcgcgagccaggaaggaacgcgagacacgggcgatgtatacaggttcaggccgcccggaagcgtaataccctactcctgtgtttttggtggatctgtgtatgaacaagttacaaagtatgaaccagcccttccccgctccaaaagtccaagatccgttttttttttcccctttctaagtgggcaaggtcctccttttatatctcaaggggataccacatgcacctctccctttccaaactggacttttcttctcttcataaatggacggagatcggtacggttgctgtccgagtgcccttctgacgggacggcccatacttacccccacttccgccggaaacaggtgcgacgtgggattatggctgtctgttgatgacgcgaccagtgtcagaccggtcacaaatcagtcatccttgtccaccacgtgtcagctgggcaaacatgcatgtttgcccttcttcatgtagcatcttgcctgtaatggttgggatgaagcctggtataaatctaaccagggctaacgtgccatctctaagagataacacgctagctccggcttgagacgagtgcctagaggctttcgtcttgacgggatggggcaaggcgtgcgtcagaccgccagtcgccacctaacccgtgatctgaccggtctgtgactggtcacagaccggataaaggaacgcgctgcactgcgctgcatgcagcgtgacacgcttgaccagactgcaataaatgtggttaggtgagcactaccgtgttcacctatcccatatatgtggcgcaaacctcctcaaggggtcggggtgcctcggccctcggggccggggcaggagtaacccgacccccctcggggaaatcaggaggagagcggacacctcaccctcgggcccgacgtccccgaaggtgccaggccacgtgggtgattgtgtctgcctcaagcctcaggtcacgatactcccggtcccatatcaccgacagtagcccccggcgttatgccagggcgatcgcccttctcaagggaagcggtcgggcgtgacgccactcctaaagcctggtgacaggtgggaccggtctccatggttgggcagaaacccaacggtctcaaatcatgcacatcggtaatggtaatcttggctgtcaataatgggcggtctcttcaagactgccacatcacttgagcagcgcacgaatctgggcgagccgatttgcttcgcctggagatatggcaacgtcgcttcgatcggcgagcgtaattaacgcgcgcacgatacgatctgcctcgactgccacaaccgcatatccacctcatgcgccgcaagcgggcgaatgggattagtggaagcgtgggcacgagaaacaagggagcgagatagtgagaaacgagggagcgaaatagtgggcgcgagaaacgaggagccgggctcatcgatggcaagggtataaagataccgaggaaaagatttgctcccttcctttcgccattattccccttgccttcgccgcttgagccctaactctttctctgctgcaccttaccttcgccacacgcgctcgttctcaatcatcccttcctccggcgccatggcacggggttccgctctgctcgacggtagcgtacttccgccttcccgcatcgtgagcgagaggcatgccgggctgccgcgccacttcatgccggaatctgccaccggccgggagatagtgatgctgggcgagggacgcccggcaccagactacccggggcggtccgtcttcttcctccccttcgcaatggcggggctggttccgccattttcttctttctttatggatgttctggagttctacgatctccagatggcgcacctcacccccaatgcggtgatgacattggccatcttcgcgcatctgtgcgagatgttcattggggtgcgcccatctcttcggctgttccggtggttcttcaccgtgcagtcggtgtcgccgccgtcggtggttggtggctgctacttccagccgcgggggccggtgttgaaccgctacatcccctgcgccctccgcaagaagtgggacgactggaagagcgactggttctacacccccctcgccaacgaagcgcgcctccgacttccaagccagcccccggcgcaggtctccagctggcgggcgccggtagatctgggggatgattatgacgccgtcctcgaccgcctggcgggcctgcgatcccaggggctcacaggggccatggtgtacggcgactacctccgtcgccggattgcgccgcttcagcggcgcgcccggggcgcctgggagtacaccgggtctgaagactacatgcggacccaccagggagtcagatgggattgggctcccgaggacttcaagatcgtggtccaaagggtgctgaatctcagctccgtggaggcgtccctcattcctcaaggaatcctccccctctgcagcgatcccgaccgcgcctccattctgaccattatgatgggggtcggggcctcagaggaggaaactcctaagggccacgacggcgcgggcgagagccgccggggggaacaatctaccccaggagggggtcgtgcttttgggccccgcgtcgggggctcggggagcagccgccctgccgacgcctaggggaagaggaagctgggaggaacaccttccccatctcctccccgagggggcggggcggtgcgtgccagcagtcggcgcccggagggggccgcgccgacatcgcagcccgagggggagcgcaagaagaagcggctccgcaagatgggggagacggaaccatcccggggaaacctaatttcccctccaaggtggtcatttaaccgaccccctcgcaggttcgtcccactctcattgcgaccgtctttcttctatcccaaaagcaagttttctcttacccatcttgtttgtcttctggttttttcttctgcttcagcgatgtcccgtcgcgttcctcccgccatcccaaatccggccagtccgaggccgaagatccggcggccgcagaggaacggaggcgagaatctgaccggtgagaggccgcagatcgccttcgggaagctgaagaggccgcccgggaggccgctcgggttcgccatgcagaggataccgctcgggaggaggccgcccgggctcgccaagccgaagaagccgctaaggaggaggccgcccgggctcgccaggctgaggcgatggcgtcttccgaggcagcccacgagaaggctgctggcgcgtcgcttgggcccactccctcgggcgacgctcaggcgacagcctccggggcggctcgcgacgaggccgcgggcgcatcgcctaggcccacttccccgggcgacgtccaagaccaaacgggtccgggggacatccccgagcccagcgcgtcctccggcgggccgagccgcgtcgcattctctccaaggcggctcttctcctcgtcttctgtcgccccgctgagcgccgagccccttctgcaagccttgaccgccgcaaacaccgcggtgctagatgggttcaacgcccaggtggaggccttgcaagcggaacgagcagagctcgaggccgcatgggcgcgtgtcgaggaggggcggcgctcggtggatgtcatggtggaggtgggccgtaaggctcaccgccgtcacgtctcggagcttgaagcccgcaaagcggcactggcggagatcgcccgagaggtggaggaggagcgggaggccgccctcatcgccaccaccgcgatgatcgaggcgcaggacagcctccaccttcaacacgggagctgggaggcggagctaaagaaaaagctcgacgccgcccaaggggtccttgacaccgccgctgcccgagagcggcgggcaacggagatcgaagcggcgtcccggcggcgcgaagaggcccttgaggcccgtgccatggcgctggaagaacacgccggcgccgtggagaggagcttggcggaccgcgaggccgccgctgctatccgggaggcaacactggcggtgcacgaggccgcctgcgccgaagaggagtccgcgctccgcctccgcgaggacgcaatcgctgagcgggagcgagctctccaggaggccgaggccgcggcgcaacggctggcggacagcctgtccctccgcgaggcagcgcaggaggagcaggcgcgccgcaatctggaatgcgtccgcgccgagagagccgcactggagcagcgggctgctgacctcgaggcgcgggaaaaagagctggacgcgagggcgcgcatcggtggggcggctgcgggcgaaagcgacttagccgcccgcctcgcagctgccgaacacaccgtcgcggacatgcagcgcgccctagactcatccgccggggaagccgaggccctccgcttggcgggcgagatagggcccggcatgctttgggatgcggtctcccgtctggatcgcgccggtcggcaagcgggcctctggaaaggccagacaatgacgcactccaccaatctggaaggcctcgctccgcacctcacgaagatggcctgggctctccaacaactccccgaggagctcgagaagaccgtcaagtcatcctcgagggacctcgcccaaggagcggtcgaactcgtactagcgagttaccaggccagggaccccaacttctctccatggatggcgctggatgagttccctcccgggaccgaggacgacgcgcgcgcgcgggtccgggatgccgccgaccacatcgtccacagcttcgagggctcggcccctcggctcgcgttcgcccccaactccgacgaggagggcgacgccagcggtgcagacgacggtgacgacgaggccggcgacccgggcgcaacggaatgagcccccaggcccccgccaatctccagttttttctttttctttcttctaaggccttcatgcctcttttttgtatagatcaacttaatctgcaatcaaaaatgatgaaaaaattctttgtgtcaatttttttttgctatgcgtatgagatgaggatgatctgtgccgtggcccttttgcgtcttagcttgatttaagggctcgtgctcaagtcccagtcctcaaatggctcgggtcggggctagtgcctggggagatccacatgtcgagactggccaggccgggaacgtggtgaccgagggttatgggtgacccgattgtgggtttttgccgattccccccccccccggagttcaccacgccccggggcacggctcggttctgggccccgtttggcgattttagctgaccgaaccgagcccccgagggcaaggttgagcacgagtgaccttatttcaagtcaagattcttcaaaagaaaaaaacgacatagacacagcctttaggaaattgaaactgcttttattgaaatgctgaaataagagaaatgagaatgtgcatgtgtggtagcccccggccaaccctgcacacccgaggggggtgcggggttggcccgagcccgaaacctgacacccgacccccccctcaggggtagaagcgacgaaggtgttcgatgttccacgggttaggcagctccgtgccgtcgcccgtggccagccgtatggagcccggccgggggacaccgatcactcgatacggaccctcccacatcggtgagagcttgctcaatccagcacgcgtttggacgcggcgtaagacgaggtcgtcgacgcagagtgatcaggcccggacgtggcgctgatggtagcgccgcaggctctgctggtagcgcgcggctcggagggccgcgcgccgccttcgctcttccaagtagtcgaggtcatctctacgaagctgatcttgatcagcttcgcagtacatggtggcccgaggagacctcagggtgagctcggatgggagaaccgcttctgcgccgtagacgaggaagaaaggcgtttccccggttgctcggcttggtgtggttcggtttgcccagagcaccgctggcaactcctcgatccaagaatcgccgtgcttcttgagaatattgaaggtcttggttttaaggcctttgaggatttctgcattggcgcgttccacttggccattgcttctggggtgggcaggtgaggcgaagcagagcttgatgcccatgtcttcgcagtagtcgccgaagagttcactagtgaattgggtgccattatccgtaataatacggttaggcactccaaaacgggccgtgatgcccttaataaatttaagtgcagagtgcttatcgatcttgacgaccggataagcctcgggccacttagtgaacttgtcgatcgctacatacagatactcaaacccgcccggggcccgcttaaacggtcccaggatatcgagcccccagacaacaaatggccatgaaagtggtatgatctgtagggcctgggccggctgatggatttgcttggcgtgaaactgacacgctctgcatcgccggaccagatcgactgcatcattgagagctgtcggccaatagaatccttgacgaaaggccttgccaaccaaggtgcgcgaggcggaatgggctccgcactcgccttcatggatatcggcaagaagctcaacgccttgttcctgaggaatgcacttcaggaggattccgttagccgcgcgccgatagagggtcccttctaccagcacgtagcgtttggaaatgcgttggacgcgttcactcccttcgcggtccttaggtagagtcttatctgtgaggtatgcttggatctcagagatccaagcaatcaatctaagggagcttggagcgctcccttcgggtcccgaggcctggactccgacgggcctcgggggccggtcaagcgcatccgtctcccctaaggggttgggtcgcgccgacggctgggtaagcctttcttcaaaggcgcccggtggggtctgggctcgcgaggacgcgagccgtgagagttcgtcggcaatcatgttatcccgtctgggcacgtgccgaagctctatcccgtcaaaatggcgctccatgcgccgtacttggcgcacgtaggcgtccatctgcggatcagagcaccggtactccttacagacttggttaacgaccagctgggagtcgcctaataccaggaggcggcggatccccagtccagctgccactctgagtccggcaaggagtccctcgtactctgccatattattggtcgctcgaaagtcgaggcggaccaagtatctgaggacgtctccgctcggagaggtcaacgtaacccccgcaccggcgccctgaagagatagggagccgtcaaactgcatcacccagtgggctgtgtgagacagctgcgaggggtccgtgctggtctcagggatcgagacggtctcgggagccggggtccactctgccacaaagtcggcgagggcctggctcttgatagcgtggcgtggttcaaagtgcaaatcgaactcagaaagctcgattgcccatttaaccacccgtcctgtaccctctcgattatgcaagatttgaccgagggggtaagacgtaaccacggtgacccggtgcgcctggaaataatggcgcgttttctttgaggccatcagaatagcgtaaagcatcttctgggcctgagggtatcgggtcttggcgtcccggagggcctcactaacaaagtagacaggccgctgcacctttcggcggggccgatcctctttgctaggggccgtattcccggggcgttcttcgtccaagtggcctctcggggcgcactcgtcttctgtgccgatgacctcggggtcggaggatgacaggggcggccttcccacagtggcctcggggccgtcctgggggtcgggggctcctggcgtcgtcggacaagcgggcaaaaggccaactccggtcgtcaggggccttaggccaccgttcggctcgggggcctcttctccctgcttcctcccgggtcgagtcagcacagggttagcctcggggtcaaagggtgataggtgcggccttcccgcagtggcctcggggccttcctgagggtcgggggcacccagcaccgtctgacaagcgggcaaggggccgactccggtcgtcgggggccttaggccaccgttcgactcggggacctctcctccctgcttgctcccgggccaagtcagcacagggtgggggtgcgcggaatgaggattgtcctcatcgcgctccacaaccaacgctgcgctaactacttggggggtcgccgctaagtaaagtagcaggggctcatttggctccggggcgactagaaccggaggagagctgagatacgccttcaactgggcgagggcattttcagcttcttccgtccaagtaaacggcccggagcgtttgaggagcttaaataagggtagcgccttctctcccagcctagatatgaaacgacttagggcggccatgcaaccagtgacgcattgcacatccctaagtttgctgggggggcgcatccgctctatagctcgtatcttctcggggttagcctcgatgcctcgggcagagaccaagaacccgagaagcttgcccgcaggtacaccaaacacgcacttatcggggttcagttttatgcgggcggagcggagactctcaaaagtttccgctagatctgagagtaaagtctcttggttgcgcgtttttacaaccaagtcatcgacataagcctcaacattacgccctatttggctacccaaagaaattcgagtagtacgttgaaaagtaggacctgcattctttaacccgaagggcattgatgtataacaataggttcctacgggggtaatgaacgcagttttttcctcatcctccctagccatgcgaatctgatggtaaccagagtatgcatctagaaaacacaaaaggtcgcaccccgcggtggagtcgacaatctgatctatgcgaggcagggggtaagggtccttaggacatgccttgttaaggtcggtgtagtcgatgcacatccgaagcttgccgttcgccttgggaacgaccaccgggttcgccagccactccggatggatgacttcacggatgaatccggcctccagaagcctcgccacttcctcgcggatgaaggcttgacgttccggggcctgccgccgcactttctgccggaccggccttgcgcccggccgcacggcgagacggtgctcaatcacctccctggggaccccaggcatatccgccggtctccatgcgaagacgtcagcgtttgcccgcaggaaggagacgagcgcgtcttcctatttgccatccagaagaccaccgatccgtgtggtcttggatgggccgtcgcccagggcaacctccttgaccgggacctcgtcgcatgtgacaatccgctgcctcggggcggtgggggcggaggtgccaagcctctcgtcaccaccctcgggcttggacgcagcagcgaggtggtccgcgcgctgctccatgcaggcgagcgcgactttcaggtcgccatggacagagatggggccaccggggcccggcatcttcatctggaggtaggcgtagtggaccgccgccatgaacttcaccaacgcgggcctccccaggaccgcgttgtagggcagactgaggtccgccacatcgaagttcacccgctccgtgcggaagttggctgatccaccaaaggtgaccggtaggtcgatgtgacctaacggccatgtgtgccccggcgtcacaccgataatcggttgggacggctggagcaccatccccggggccttgatggcatcaaaagccgcgggggaaaggatgttgagggccgctcctccatctatgaggacacgccccaacttcacgttgcagatggtgggggaaaccaccatcgcaatctgccctccccgggcaacgcacggtgggtggtcggtctggtcaaaggtgagggcaacctccgaccaccgcgcccgacgcgtcgcctcatgagtaggggccgcggccagaagctctcgcttcatagccttgaagctccggcgagaaacgtgagcacacgctcccccatcgacggtggcaatggtggccccaggctcttggaaacctaggtcatcatcgccatcatcgatgtcctcggcgggggccttctgcttggcctcttttcgccgattgccggaaggaaccgccggagacttgccctcacggcgttcctgcctcctgtcctcctcccacttcctcgtccgctcagccaagcttttgactgcgcggcaatccgcgagatcgtggagggaggtgttgtggacggagcaccacttgccggccgggcgctccctgctgggagcaccagcctttttctctttgtcgctcgcaggcctcccctttcgggtggcccgcgaagcgccctcgacggcgaggacatgaccctcgtcgccggaatggaccgacctcttcttcctcctcctgtcacgccgccctatctgagcggtggacccgggggcggccgaagctgccacaccggaaccggaggggttccaggtccacgcttcctccttacgagccactcggtccgcgagctgaaaaagctccgcggtagtctggggctctttggaagcgatcttttcgagcatgcggttgtgccgcacaccccccctgaacgcgtagatcaccgcgtgtgcagggatgcatggtatggtattgcggacttggcagaaccgctgaatgtacgagcgaagtgactcatcatcccctcgctgtactgcgtgcaagtccgcttcttcacctgggcgcggataagtgccttgaaagttcatggtgaactgttggcacaaatcttcccaggagtggaccgacgcgggaggcaggttcattagccaaccccgcgcctgtcctttcagggccatgggaaagaaattcgccatgaccctgtcgtcacccccagcggcctcaatcccggtcgtatagacctggagaaactcggtggggttgacgctgccatcatacttctcggtgatggtgggccggaaccttgggggccaacggacattccgaagactcgccacaaaggctctacagccgacaccaccaaccgggggcacggagggctggtcctcacgtccatgtcgaggtgacactctggacgaagaggcgccctccgttgcgcggggagtacgccggctattacgccggcgctcgatgtcgaagcgggcatccggctctccatgctgatcctcccgagtcggaggcgccgacgagggagtggcagccgaatggcgtgcaacagccgccgctcgccgcgccctccgccttgacgacacggagccggtggtggcggcgccggaggtcctggtggtggcggaccgtccaccagcacccaggcgctgctgtgccgtcatgaccaagttggccacatcgtccagccatcgctgggctggagactccgggtcagggacgacgggcgggtgacgtaggagcgcgccagcagcctgaagcgcgccctgaggcgtgctgccgtcgcagtagacgagtaggcgacgctccccatctcgccgttctcctgcatcacccgcgactggtgatgctgcggatttttcgaccctctcgagcgcctccccctgcttaggactttggtgtggaggaggtgggggagtacgagctcgacggcgtgggtttggctccccgtcgtcgccgctcacactcggagagaggtcgtgcgcctttgcttgctcggccattaggctgaacaagaaaaacttggcgcacacggaagagtgcgagagctcagaaaacacacgctgagccccctacctggcgcgccagatgacggagctcgtggctcctcaccgggagaccgctctggcccccctttgccggttcggccgggggcttagggtgaaatcccaagctctctcggtatgtggaaagatcgcgagccaggaaggaacgcgagacacgggcgatgtatacaggttcaggccgcccggaagcgtaataccctactcctgtgtttttggtggatctgtgtatgaacaagttacaaagtatgaaccagcccttccccgctccaaaagtccaagatccgttttttttcccctttctaagtgggcaaggtcctccttttatatctcaaggggataccacatgcacctctccctttccaaactggacttttcttctcttcataaatggacggagatcggtacggttgctgtccgagtgcccttctgacgggacggcccatacctacccccacttccgccggaaacaggtgcgacgtgggattatggctgtctgttgatgacgcgaccagtgtctgaccggtcacaaatcagtcatccttgtccaccacgtgtcagctgggcaaacatgcatgtttgcccttcttcatgtagcatcttgcctgtaatggttgggatgaagcctggtataaatctaaccagggctaacgtgccatctctaagagataacacgctagctccggcttgagacgagtgcctagaggctttcgtcttgacgggatggggcaaggcgtgcgtcagaccgccagtcgccacctaacccgtgatctgaccggtctgtgactggtcacagaccggataaaggaacgcgctgcactgcgctgcatgcagcgtgacacgcttgaccagactgcaataaatgtggttaggtgagcactgccgtgttcacctatcccatatatgtggcgcaaacctcctcaaggggtcggggtgcctcggccctcggggccggggcaggagtaacccgacccccctcggggaaatcaggaggagagcggacacctcaccctcgggcccgacgtccccgaaggtgccaggccacgtgggcgattgtgtctgcctcaagcctcaggtcacgatactcccggtcccatatcactgacaaacgtaatatcttgttatgtatgctaatgtaatggtaaagtgtatatttaaaactagtagatctacgcagttaccgatatctagcaatacgcagttctagattaatacaactaaaaccctagaaaatataatgcatttattcaaacaaagttttaaaaaatacacagtagttaactcaatagtcaaaaatataatgcatctatgaatattacatgaaatcggagtctcgaaccgacagagcttcgcctcttcttctcttctcctcccccttcttttttagagtggaggtgatgggaggaatgaggagggagggctgggcggcaaggggcctccatgcaaaaaagccagcccaggccggcccctttccaccctagcagtgggcggcaagggtttaatgaaaaaaaaatttcgatccgccgtcatcgcctgtccctcccctgtttgccacgtcagcttgccatcctagtggagggcagcaaagtctatttttgtaaatttttccaacgataaattatttatgtaaatattaaaaaaaattaaaaatgaaaaaaaattcgatgaaataggcggactggcccaagagcagcagcaaactcaacgacgggtcgatggctgaaggcccaaaaatccactcgcagctacaacgtgtgtggcccaaatccgacccggacacgcgggagaggccaagtccaagtccgaggccgcagcgcgtgcgcgtgggagcccgaagcggcgtgggatcctgcggcaatccgtgccggcccacgacggatcagtgcacattgtttttgtggtcgggagtgtttgaaaggagggaaaatagaaggtggagaaatacctaaaacgatatgagtcatcaacacatgattaattaagtattaactattttaaattttaaaaataaatcaatatgattttttaaaacaactttgctatagaatttttctttctaaaaacgtaccatttagtagtttgtgaagcctgcgcgcgaaaaagaggtactgtctctctcaattaccctggaacgagagagcctcgtcgcccatgcaccactatcaactattttgaaaagtttaatattacagtcaaccgttagctctaaaattgatatatcatctgctgtcaacctaatagcatatttgtataatagttttatataaatataaattgcaccattagtacttggctcacatatgtaacgtgtttttcatttctcttctccatggatgtttatagctatttataatatgttattggacttattattagttgatggctttcttctctctcatgctttctctctcctccacttagcttttttaacgtattaaatttagaaatcaaaacaatatgaatatatttatgtttatgtatcttcaaaatcaatgttaaataaaactattagcactgttaggcggttttctcttggaaatatcttttttatgtgatatcttattattattactttatttttagtaggctggctgcatatatttaatataaatattaaattaaactaaaaaagaaaatctcgtagtattttgatactaagatgcgattcatgatcatacttagacttatgatcatactcccgccgggccaaaaggagcgacaaaatatgattgattaagtatttactaatttttttaaaaaaatgaaaatgtaatttttaatgtaactttcgtataaaatatttatataaaaaaaatattgtttagccgtttgaaaagcgtgcgagcgaaaaacaatggacacagcctaaaaaacaatgggctggtttggtttgtggcctaaataggacttactaaattttgtcagtgtcaaattttggtatgactaattttgataaggcaaagttgtgcttggattgaagccaaaataggctaagttcactattaaaatggcctattttcttaggcatgaaaaacttagcttcaaaccaaatagatattaaacactatattaaaattatcaaatattgataagtctaatttaggtctcaaaccaaaccagcctaaagatcctgataatgaccaatctggaccgtgcgtgttctggaaaggaaaaagaacattttccgctgttccgcctaatgagtctacgcgcaggcggcaggttagttccaagagaaaatgtcgatcaataacgcggattctagagtaacgcggattccagactattcctccgtggtctactttatccagcgttggaaacccgctcctacacacacacacacccactaccgctctccgcaattcagccagactgcagttgcagcaacagcaaggatggctggtggagtcggggaggcgctcgtgtccgccgtgctgaaggaggtgctgggaaagcttggctccgccgtcggggaacagatcgtgatgcgatggaacctgaagcaagatctggagagcatcaagagcaccctgggtatgcttcaagcggtgctcagggatgccgagaggcgctccgtgagtgacgaaggcgccagcctctggctgaagaggctcaagaacgcggcctacgacatctccgacatgctcgatgaattcgaagccaagttatcggaggtaaaaaagtgtcctcccgctaggatgtcgtccttcacttcagttttatgcttatctatgctcctcccgtcaaaaaagatttgacatttaggacaatatttagtagtctcagctagattccctaaggctttgttcggtttagaggggattgaagaggattggaggggattgatggggaataattccacaccataataggtgtggaataaatcccctccaatccctctctcatggggttaaccgaataaggcctaactggtttatagtgcccaacaagcaaatagaggttttgcagcgtgttccaatggggcaactgctcatttgcctttgtactgttacagtcatgttcaagagcaagtttttcctttctacttcctccgtttcatataatcatattataagactttatagcattacccacattcatatatatgttaatgaatctagacatatatgtgtgcctagattcattaacatctatatgaatgtgggcaatgcaaagtcttataacctgaaactgaggtagtacttctttatgttgggacagtcgtttcattatgttttctacaaacgttcaacagacaacattctctagctcggtggccaagttatttatgggcaaaaggttgaagaatatgagggtaaggttaacagagatagcagcagaacgaacacactatggattcactctagatacctaccctagggatctggaacgggaagagatcagcaagagggaaacaacatcaaagatcaataagtcagctgttgttggaagaaacaaagagaaggaggaaatattagcattgttagaatcggacaacattgaaaatttgctggtaattccaatttttggatttggaggtattggtaagaccacactagctaaattggttttcaatgatgatcgaacacaaacttttgatttgcgtgtatggatttatgtatctccaaattttgatttaaaaacgattggcagaagtataatttcacaaatcaaaggacagagtgactgtttagatgatctacagtcaataagtaactgtcttgaagagatattggatggtaaaagttgcctgattattttggatgatttatgggagaacagctgtttccagttgggtgagttaacattgatgctaagcagctttaaggcagaaagcaggcttaggatcgttgtcacaacacggaatgaagaagttgcaaggaagatatgtacagttgcaccatacaagctgaagccattgtctgatgaccattgctggacattgtttaggcagagtgctatcctgtctagttgtacttttcaaggaggtgataaaaatgtgttggaagagataggatgggagatttcaaagaagtgcaaaggagttccattggcagcccagtctctcggattcatcttgcgcaccaaagatgttgaagaatggaaaaatgtgagagatagtgatgtatgggatggatcatctccagaagatgttgtgctgccatcgctgaagcttagttattaccagatgcctccttatttgaagatttgcttttcttattgttcaacatttcctaaaggttgtgagatttatagtgatgatctaattcaacagtggatatcgcttggtttcattcaagaaagacctaataagcacatatcgcttgaaaagataggagaacagtatgtaagcgagctattgggaatgtcctttcttcaatattcaagtcttgtccctggtgagcgaattttccaacttacatataaatctctttagttgatttacatataaaccttaaaatattcaagagatgtaagttggaaaattttaatgttcacccaacttattttggggcatccattccatgaattccaacagttaagattacatgacttttatggtgtttgcatcccaaaaagggtaaaacaccataaaagttctcttaagattgccatctaggaaggagtaattggttagcacttatcatgccaagggtagtatagtcttttttgacagtatcataagtaagaaaacacacatagccactgtcatttgaataatagagcaatgcaatgttttcttatcattcatgatttaattttggtctaagtgtgttacttttatgtgatatgcatgaatctggacattgggcattagcagtaatgcttaaacgtataattgtggctatccatggcgcacaaaaaaaaaaggatgcacgcattgattccatgattttgttataaaaaaagttaacatgtttaataccgcatacagagaacatatatcagttttcaaatattgatctatatttctatttacatagattgtacagaagaaatatttataaatttatatgagtatttgtgattttgtgtaccatgaaatgttatattaagccaaaaggacatctgatttccttgaatacatgggaggatgaactaaatgtgcttagaaaagtttcttaattaacataataaaaatctgccatactaggcaaagtgcatgcatggcaattacccttgatcaatggatggttcggatttaatactcatcttacctcatagcagctaagtggagcaccctaaaattgctcatataagtttagtagtctaatcctttttcttctattgaattaaaattcaggccctctttctattgaataggtgtactttcagggtcatcctggactaatttaaacatttcaatgtacgaattttagattacacgggactacgggaggatgctaagtgttctatggtactcagcatgcatgatttgatgcatgatcttgctagatgtgttatgggtgatgagctacttctaatggataatggaaaggaatacaactctggagaaggcaattgtcggtatgcattactaatcaattgtgtcgggcaaacaaagttctcctattcatctactaaattaagagctatgcgttttttcaactgtgatggaattcagctacccttatttacaaaatctttgcgtgtcttggacataagtaagtgttcttgtggaaaattaccttcatctattgggaaattgaagcaattgaagttccttagtgctactggcatgcaacataaaacaattcccaagcatgttatgaaactttcaaaacttatttatttgaacataaatgggtctttgaacatttcaacattgccaacatcagtgaacaaactgagatgcttgctacacctggacctatctggttgtagtaacctttgttcattgccaaactcattcggtgacctgacaaatctcttgcatttgaacctagcaaattgttatgatcttcatagtttgcccaagtcttttcataggctaggtgaactccagtatctaaacttgtcacgctgtttatcattaaatttaatggttgacatcaatgctgtgtgctgccttacaaagctacagtacttaaacctgtctcgttgctcaagtctcatccacctacctgaaacaattaggggtctaaaagatctccacactttagatatctcaggatgtcaatggatagagatatttccgaaaagcatttgtgagatcaccagcctcaaatttctgctaatacaaggatgctcaccctggttagagaagcgtgtgagggagtctcagttcaagaatgatatgctagcattgcccaagtttattgttcaaagagcagcttttggcatgtgtagcaatatttcgcggcttcaatctgtacatcctgctgagctagaaattgaatgccttgagaatgtaacaagtatcggagaagtggatgttgtaaacttgacgtataaatcagcactatcaaaattggcattggcatggactcctgcagctgagcgttttgtggaggatgaagatttgctgcggaagttacaacctcctgacactctaaaagttctccagatacaaggctacatggcgacatcatttgctagctggatgatgaacttggcatcacgtctgccttatctagtccgaattgagatggtagatttaccaaggtgtgaatatttaccaccatttggtcaattacaacatctggaactgttgattcttaggagaatccttagcctcaggaaactgggaggagaaatttgtggtggtaatggagcattcaggaaattgagggaatttacattggtaaagatggataacctaaatgagtggatcaccaaagtatcggctaatggtgaattcatgttccccagtcttcacaagctggaaatttctcagtgtcctattttaaggttaaatccatgccttcctagagctcttgaatggagaatagaagcaagcgatcaaattatagcagatttctatcacacaggctcgtcatcgtctttggtactatcgaaaatgcatattagaagctgccgcctgctgcccaatgactggaaactgcttcagttccttcctgatcttcaggtgttggaacttacacactgttggttttacgaattgccaaagagcattgggtacctgacgacactccgatcactgcggatagatggctgcgatagcatgacgaaactatcaaaatggttggtcagtctgtcattgctacatgaattaattattactggttgtttgaatctggtatatttgccggcatttgtacaaaagcttagtgccttggagaaattggaaattaatgataatgatgcactgcagagatggtgcagaaacagcgacagctggatctcagagaatggcataaaaaacaaggtaaacgcttataacattctctgcaaataagtacaattactatacttgtttggtaatgcggaacattaggcgcctgaatttttctattttaagtatcgtatattttgaaacaaaccagggcatcttattgtaattaagttctcaaaaagtacatacaaatataaaaactactatgctgtaacggttttttgcaaccactccaataccttctatgaatttgtatgacaaagtacgcctaatgcatggatccccaataaatgtagctgtgtcctaactcctagttgtagccttgtagggcttcaggtgaactttgttcttacttctatgatgtaatgtatgagatgtcactcggctatatattaattttaatttgccatatactacatttcatgttcctctatatatctattatatactaaaagtccattaaacttcctacaaacgttcctaaatcaccacttggcgctctaataaattagagaaatcaaagaaattctgataaaaaagcaaaacatcctacccttaattttcaatacggtggacctattattctttaccattagatcaaaatcaaaaaatctatccataaccccaccacctcctgggcctcctcctcctctccccatcacgtaggtacgtacgtacatccatctgtccatccatcccctcctccgtctcctatcctataccattatttccatcttttaattttctacctaccaaaatttaaaatttatgatgattaaaaaaaatcaaacattataaccaatagattataatctacctattaatatcctaaaaaaatatattaaacttcctaccaacactcccaagacatcacgtctgtaaacgctcctacgtcaccacataatgctctaatgaattagagaaaatcatagatattcaacgctccaaagccgtcacgtgatactctacaaaccctcctacaccaccatatgatgctctaatgaattagagaaaattgtagatattcggagaaaaaataatatgtcatctttatttttacttaaattgatggatccattattttagatcattagattaaattttacttttagaaaaattaaaatataatatttccattctaatcaccgtccacgtacaagagaaaatgcgtacattcataaagttcaccaggaaaaatgtacgtgagaaaatacgtatgtacatcaagttcgccacatacgtacagttcactgggaaaaatgatacagcccaaagcaaaaaacccaaaacaacatacttatagtatgatggaaaaatatactttacaaactacatacgtagatgaaaccttaaaaactgccaatgcatccgaaaatgaacgcatgagatttgtccaagtcactacatattttccttaatatgattggaaaagaaaattcaactttgaattgggatattccaggttagaggaagctaaaatatattacttcctctttattttcctataagttgaccatccatcttattaaaaaattgtataaatatgtaaaaatataaattgggattatagattttttatgataaaacaagtaatgataaaacaaatatcatttatatattttttaatacaaatggtcaaatgtcatatcaaaatttaatagtgtcatacattcaaaatcattacgagtacttcacatacattaaattggtaaacatattattttaggccattaaatatccctatcctaatagcccatctacgtatgtagaattcaacagaaaaaagctaaaaaaaatacattccaaacggaaaatgatacatacgcacatagtattatttagaaaagtaagcggtctttaaaactaaaattttctatgatttaaaggtaatattagtctataatcaaacacagttgaactatatcaaagataaattatactgagttaaactacatcaaagataaaatatcaaattaatggcctttaaatgtccttacttgaaattatatatcacaaaatttttatcactaaatgaactatgaacggattataatggttatttgtagggctaaatacatcacaacacatggtgtcgacatgtaataattatagacacaataacttttaaataattttacatcataatttatggtgcacaatatcacctaacaaatatacaacactaatttgaatatacgtatgtaaactaaaaacagtagaatttaatcatcttttttgaagtatatctaatttaattttgtttatttttcaaaactatttgactggtgtagatatgaagtcaaaagcatacatggtcaaaaaaaccagaagcatacattctatgtagatatgaaaaataatatcaaaaatatttctagccactataatacaaccccttaatacatcatgataattatggtcatatatgtaaatttgttttctttgccaagacagtattggcaacaaatgaacaattcagtaacattgacattaaagtactcatgatatattttctaatagtggagaaattctgacgtgactgtaagtgcactccaataatgaataagctatagtaaataagtttcagaaaataaacaaaattttgaacctagtaaatttgtctagaacaacaagtgttaaaggcaaaccaggggttaatcttagagattattagtgtggtatctctctttaaatatatttatcagtaatatccattgatcaacctcggtcattttttaaaaaggatattgtttctatagaattaaaatttgagtaatattaatgaacacaataaacaaactatgtctactctataccataaaacaactcataacataaaaacaaattattttcgtcaccttcgtcttctctttgtacttttctgaagggcaccatgcatgatagtagagcattctacgcaatcataagtaaagcagaggcatacatatggcgggctgaggtagtcccaatgagaggatgcctttagcaatagagctcaacttcctatttcaggaggcaattctctatgagggcacctataattaattaggcattaaaattatgctccacgctggtctagaatgacatggctatgagaaacccatatttcaaggtagcatggaagaaaacctcggtgcccgcggttggcttcacccaatacatgaatatgtttatctgatttaacgttgttagcctattaattgatagaaaaggtatttttagaatatttagacatatatttggaaataagcgagacatggatagtcatctaaataatatagatgatttttgtagttaactaataatgtattaatcttattgtaacggtatgatgtagtttgatctattatagactcttagctttcaaaaacaataataatgataataagtatccaataaaacaatataatcatcataagaagaggtgacaatagaaaagtgatttttattttaaatttaggaaatactcttatcatttagtattgttgagatagtataaatgttttttattataagataatatatagtagtctataatggatatggtaagttgacttattttattattcttttcataaataaataaataagatgccaaccttcttcctagaccaaaagaagcattataaatgatttcttgtaggcatgaattaaatactaaataatttcaagctaccaaatagtttgaaaaaaattactgagcgatgctaataaagaaaagttgtgaagaaatagtacttttaaagcatggcaggtatcatctggtttatattccagttatataggtttccgaaacacaacatgttatgttatacatgcgcgaccttcctagttaaagaaaaagttacatcacaatgtcacactgcatgcacaattattggattcggtattcggacatcctgccaagctgttggggttttgccttgtcgggcatgagattacgagttgttttcttgttgcaaaaaaggctaatgacccaacatacgtacgactctctactggtgatttagtaaccgaagagtaattatcttatttagaaattttagaattagaattcctcttttgctcttattgactctaaaggtctcatggacttctctacatggcagattttagattgatacaaagttagggagtgcctatacatctttcgaaagatttttataatcgtatcacacagatttttaatctttggattaaaatccgatagatataataaaaagcaaaagacaattaagaaacaccataatagacactaaattaccatatcctcaagaaaaaaatcaaatccaatacaaaatttaaaatttgcgtgcgaagattcaaaaattacagtgtaacttaccaaagttacagtgtaagtttcataaattacactgtaacttacaagaaaatgcaatgtaaaattgagagagaaaatcgagtgatagataagaaaaaatctttcgagtgagatatagcaaaatcgcaaacttattgcaacttttgagtaaggtagtcatagtcttttacacatagtccattactatttattactccctccggttcgttattagttgacgtcagagacttgactgtttgaatgaaaaaaaaatagcgtttaagttttggttttggtgtgatcagtttggactaatttattccccttcatgcatgcaaaacacattaagctagccacatagatgtatttaatatgagtacaacaggaaatagtcactctaattaattactcattggtatctaaactcttgtctaaagcgtctataaataatgaaccggagagagtactaattaaagtttatcgtggttactatctccagatttattttgatggtaagttgatgagtactaagaagcaagaggacacagcagacattgacagaactgacgtccgtgattacagaaatccatgcgatgaagatgaatatgtagactgttttgcgatgctcgaacttggtgagtcgtcacggatggggcgatgaacccgtcgagaagtgttctgcaacagttgtttgtatctgatagagatttgtcttgtgagggtttatattaccggttgaccactaaatttcgagcctcatcggtatcatgttttttgataaattttgatcggtttcggataaatttcgactgaatttcgaccaaatctactgtttaaccttcgaaattccaatcgaaacttaattttgagccgcgtcgaaacgtcgaaatttcgcggaactcgaccggttttcatcggaattgtgaaaccctgcttgtgaccatgcatagaactgtactctctcttctttgtttgatattatataagttttaattttctcaagtcaaattttattaagtttgatcaagtttataaaaaatttagcaacatctaaaacatcaaattagtttcattaaatatattttcataatatgtttgttttgtgataaaaattctactatgtttttttaatgcttaattagtcaaaattaaattggttatgaaaagtgacttgcaatatgaaatggagaaagtacagtgcatccgccgggtttttattcatacctaaaagaattaacagttaccctccctccaaattcaccaattcggttgaggcacatgaaaagtcctaaatgagctacagagcaaatgagcgggtcaaaaaggatgccaaaacgattggatccgtgcggccgatcggacggaaaaaaatggggtgcccgcggagccgtccgatctcatcacgcgcgttctactgtcaggatcttccccgtgtcacccgttgccagggtttcccttaccgccggtaatcgcgcggttaccgggcttaccgcggggtaggtaatataaataccgcggtaaccttcttaaattcaaataaatttaaaaaataatttaaatttttgataaattttgcacggtttcgtacgatttttcacatataccacggtaatcgtgcttaccgccggggcacggtaaccccggccagggcagtttgggaaaccctgcccgttgcaactgcccccaaattacggggttgtaagttgcaacatcccgtaacggcagtattttctcttttttccccctgcaacctcctccgacaaactcggttggagcggaggtgagcgcacaggcgacgagggtttcctcgtctccacaacggcggtggtggaaggggcagccaacctcggagcatacgcgccagttgtcgcctctcccgggcccttttatttttctttttcacactttttttttttgatcttagacgcgtttttttcactgtttctttctgttttttttttcaatctttcacacacctctttacaaatgtagaattgaaaattttttattttgacttaaaagttttaaattttgtgttaaaattttttcgaattttggctgaaagttttcaaatttgatcaactcgaatttgaaaactttcaacccaaaatttgaaaactttcaactcaaattttgaaaacttttaagtcgaaactagaaaacttttaactcaaatataaaaatttccaacctcaaactcgaattttaaaactgtcaactcgaaaatttaactttcaagacaattttttgaaaactttctatcacaaattttaaaatgttcattgtatcgctgaaacttttcaacttaactatttatatattattttgataataaaatctacaattagattaattcataagcttagcactgttattagcgttaatgacgtgtgatcgtaatagcccacgcgcttaacctgcacgtgcgacgagaaaaaagaagcggaaaaccaaaaaaaaaaaggagcgtgagaagctacggactcggaaatgcgcgcgacttgctaatccggccgtctgcgcggattagcaatccccacctcggggaaccggattggggtgggaggtgtccgggtccggtgatcgccttggagaaaagagaggaggaagaggaaggtcctcgccgttatgtagatgcacgtcagcatcattcgttcgttccatgcatctatttccagagaatccagatgcaacagaactacagatgcgatcgactcgactatcccaacctcccaatcagtcgatttttattgataaatcgggtggattaggactggttctgaagcgttcgaatttctttttttttaacaaccggtatgaggtaatgcgatatttttaatgatatggcaagaaaaaagtttatagtcttggcatactatagttaggaaaaggaaaaaaaaacaaccgcaccacacgtctatgttttattctagtgctaaaaacgaaatagacacacaacacctgtaaacaacacctccaaagaggaaacaacacaaaaagctctaccgccgctcgtcctagagaactaggacttgatttttcaccttaataacacattgggagaggagagaaaacgtaacaacgtcccaagggaaaatcagcgcctgcaggcgtcattgttgcccgtccgaaggctaagatctttgcccatagttcctactctcccgcgccaaagagtgcatgtcagattcagcagaaccactagctattcccctcacgcacagccaccacaccaacaccttgccgccagccggtcatcaaatgtgtgttcttccctcaaggttcccaaactcacctctttcctttttcacaggcacgcttctcaagctgctaaacggtattttttataaaaaaaatagtttctatacaaaatttgttgtaaaaaatcatattaatctatttttcaatttttaagctaatatttaattaatcatgctttaattcatcgctccgttttacgtgcgaaggggggaggttcccaaccctccaaaagacacagccaaagtagagtctaaacctacgacacgcttcaacttcttccacgtggttggattggagaggggaagggtgagagagaagaattgatcccctctcccccgcactagcccgtccagcgtggccatcttacggcggcaagccgccggcgcgaaaggactaacgcctagaaagaaacttgccgcacgcttcaaccccccttcatgcgctactgtcgttactgccttgaccaggctacccgtgttctccgcaacgggcaggctcaccaccgttgtgcaccagccatgccatgctcgcaccacaacattgtccgcgccggcctttcgcggcccctgtcgaccttccactgccgccactcacgcaccactgtctgcttgcagcaccggacacccacaaccccgtcgccgtggggcacgcctcctagtgccaccgtgcccgcctaccaccgccaccagcctggttcctcccatctcagccgtcgtttacaccgtcctccctgcgacggcgcctcaccatcatgcccttccacctccaaacgtccgtcgcctccacgccatcaccagctcaagggttggctacccgcgttggggaggccagatccgggcagagggggccggatctgggtgttcccgcgccgcctctacgcagctgtgccctgccgcctcgccactgccaccgtcggatccagacgggagggtgtcggatctggccggcgacgccacctcgccgtcatcgcatcacctcagatctggttggagtcatgggcatcgtccgccacctgatttccgatggcccacttgggcggagagaggagagaggcgggggtggtggagcggcagctaaacaatttcagctctacctaaaataggagaggagatgggtgaagtgctctcacaaatgaactagaaaggtgaagctggatttatactactccacaactccactctaaacacaactcttgtagctaaatataggagttagagctttaacaaacaaaccctaaatataacataggcttaagcagcttcacaacttcattttaaacctcgtaatatagagagggggtgaaatgggctgacacaagagcagcagcaaacgcaacgatgggtcgatggctgatggcccaaaaatccactggcagccgcatagtgtgtggcccaaatcccacgcggccacgcgcgagaggcctagtccgagtccgaggccgcagcgcgtgcgcgtgggaggccgaaacggcgtggatcgtgcggcctccgctgccgcgctccgtgccgtcccacgaggccacgataagctgatgttgttggaccccgaaaatctcacgcgcagcccacatcgcgtgttttgcccgaaatctcacgcgcgcgaggcccagaagcgacgtggttgggcagcgcgcggaatcggaataagatcactttgactccctcaattgaccaccgaatctaaatcgtatccctcaaccgcaataccagaaatcttgactccccaaacttacaaaaccggtgcaatttgactccctgggcggttttaggaggcggttttgctgacgtggcaccacgtggtgcctacgtggcaatattgaccgagtcttcgttccacgtggcgatgacgtggcacctacgtggcggtagaattaaaaaatatgcatgggacccattagtcattcacacaagaaaaaaagtgggcccactgacatgtggggcccacatatcagtccttcctcctctctctcccttctctctctttctgtcccattcttcccttcggccggtggcacctctctctttctctccccctcttcccttcggccggcggcgggtggcgagagcgagcagaggcggcacgcaaggcccagagtggtatggcggggagtcggcgcagtcagacgcggcggcggcagcaaagtcttcgggccccaccaagcccgtgccgccgtggcgggttcgtgccgcggcggctggaggacttcagcgacggcggggccttcccggagatccacgtcgcgcagtacccgctcggcatgggccgacgggacgagaagggcggctcgaagatcctcgcgctcactgtcgacgccaagggcagcgtcgccttcgatgccgtcgtgaagcagggtgagaacgcggccggagctcccgctcggcctcctccgccgagtcctcccgtcgctcccctcacttgcgcgccgccgccgctcactcgcctatcctgccgtcgctactccgggcctcacttgcgcgccgctgccgcttgctctcaccgccggccgaagctaggccgccgctcgcttccaccgccggccaaagggaagagggggagagaaagagagaggcgccactggccgaagggaagaaggggagagagagagaagggagagagggaggaggaagaaggaggactgacatgtaggccaactttttttcttgtgtgaatgactaatgggtcccactcatattttttaattctaccgctacgtagatgccacgtcatcatcacgtggaacgaagactcggtcaatattgccacgtaggcaccacgtggcgccacgtcagcaaaaccgcctcctaaaaccgcccagggagtcaaattgcaccggttttgtaagtttgagtagtcaagatttctggtattgcggttgagagatatgatttagattcgatagtcagttgagagagtcaaagtgatcttattcccgcggaatcccgctgcaatccatgccggcccacgacggatcggtgtaccgcgccccgcgcgcgggtcatggatcacacggacgggtgggtggtggctgcgttgacggggcagtctcgcgcgcgcgggggagacgggagacggacggcgcggcgccgacgcagcgaaagcctgagaggagaggacaacgtgccgcttcgctggcgcagtgagtggcgaccggcctagtccggccggcatccaacctgctggtgctgcgcgcgccgcccgcccgcgtggccacggtgtgcagtactacagccggccacggccggcgcggaagttggtgtaagccggtaatctccttgccgatacattttttaaaaaaaaacttttttttgcctgtttttccttcttcggatagcggccggatgagatgctctagaagcagtggcggagccaccgcccaccgccgggcgaccccgggcactcgtggcagtgaacatgaagtaaaatatgatataatatagaactgtactccctccgtttcgaaatgtttgacaccattgactttttagcacatgtttgaccgttcgtcttattcaaaaaatttaagtaattattgattcttttcctatcatttgattcattgttaaatatatttttatgtaggcatataattttaaatatttcacaaaagtttttgaataagacgaacggttaaacatgtgctaaaaagtcaacggtgtcaaacatttcgaatcggagggagtacttgtcttagttagatttgcttggggtttaaaaattttctagctctactactgtctagaaaatctagctctgtatacatgctttcatcaaaatatcattctagatcatgttttgcttgccaatccatctgcggaaactgagacctcccaaacacttgtatcactaagggcattagcagtgcgacaacacattttgctgaacctcatgcgtcacataggctcaagaacacctaagaataatgtttaacacaagtttcacagtggtacctagtctcaagtggggtccacacaaataaaaaagtattttttttctctctcccttgtcctcccagtgccacgcctcccctccccctcctccggccatcgcgcctcccccttcctcctcctgctatcgcgccttcctgataagcgacggcgccgggcggcccaagcggcgacagatctggctgcggatcaagcctccccctcccctcctcctccggccaccgcgcccctcctcatcctccggccagcgtggagtggagctcgccaatgtggatctagtggtgggcaacctcgacctcctctccggtggtgcggatttggtggttggccggtggctacaaggggaaatcaacgttggcaccgccctccctcccctcccctcccctcccctctcccctcccactgccggccggcacctcttaggagaagatgcggaggcggtggtaggtcgatggaagcggacgcctctcccctccctctccccaacggatctgccagtggcgatggttggcgggggtcttagcggcagcggcgtaggtcggcgacacagattgggcggtgacaaaaatcccggtatgcccctccctattccggtcatcgtctctcccctcccgaagattttctctccactcctgacaaaaacctgacgaggaacggtgatccattttagtttcccattctttatttggtcacgggagaaacatacgaggcataaaatctttggacgtgataggttggaactgaatgccacctatatacactgtgaatggcctaataccgccagtttggcacgattggcatttatcgcctgcagccgtgcgtgcatgcccatgcagcggtaacagtatgtatggctcatggctggcgtgatctgacacaaaacagtgctaggatagtttggagagcatgaatccaacacgcgatcaatgggttgattaaattaatttcagctggatcgtcggagctagccatgcgcggccggcccggggagaatccaaatccgattcgagcctgcatgtggccgagattagccgatcgattagctcaaaaataatggagattccaacccccaaaatgctcgcgtcggagcacgttctgcagtgcaacatggcgcgacgccgatggctgcagcgcaggaaggttctcacgattaagaaatactagacactaatataattatagtaacaactagctgcagatggaatcatggatgcatgatcaatcatacatcgagatcgtcatccattccatcgatcgatcttgtttgtcgttgtcggatattggcgattaagacggtacagagtgatttcttgaattgttagtttgcccttgttatcgtccattctctcttatcaacttaaagctcagattattgagtgattattgctacagattatctatttaaattatagagattaactaaacatttttataaataaacttaaagtaaattaaaacaagtgatctacgtaatgtagtataataaagttttttttaataaattcgagataaataattcttttgaataattcgattaataatctgaaaataatcaagcctaagctttcgtaggagatggcaagctccataataatccatatatgggactgaaaaataccaacacaaagatcttaaattaagccccacaaggccaccttaaccacccctctaaagccacaaacaatggagatcataaacacatacctttagagctactcaagaaaacatgcacaccgtgcacacgtacgaagccggtctcacaaatcatcatctcccccctttgtgttcagcaagacggcaagcaaccataggccatgaactaactaattaagctacctgtgcatgttgcccaaccattctactatcatcatggcaataatctaattgagacgcttatgggctcgctaaccgaccaccccaattatcatgttcttcttctttccctccaagtcctatcatcaaaagctcatcattttttggcgccaacctcccatgtgcaacccccaaacttgctctttccatgcagctcgaaaaacatctcaacattaattaattttattgattgattggttagtactacagtactgtaggagtggtactcctcataatgtttaatagatgttgtcattaacttttgcacatacatttaactatttgtcttattcagaaaattacgttcacttattttgttataacttgctttatggttaaagatatttgcatatttataaattcctatataagacgaatgatcaaacaaatgatcaaaagttaacgatgtcatctattaaaaaaacggaaggaatagttctgtaacacgggcccttatattttttaattgggtcccattttggactttggactttgcagagattgcagcatgcgtcgttggactctttaagcagacgcacgcttccaaagtcccattctgaaacctgcctatatatacagcgcacaagcctccttggcactgtcaccacttagccagccttcaccattttcagacttcagagttgtgtacaagtgagaagccatgatcaagctgaggtactccaagaggctgttcaagaggagctgctcctcgtcgaaggcgactgcttgtgtcggtggcggcggcggcggccatggcaatgcggtggccgccggcggcggcggcggcggcgcgggggagatagggtgggaggtgaggccgggagggatgctggtgcagaagagggaggggagaggcggcgaggaggtgatcttggtgagggtgtccactggcttcgcctggcacgacgtgtccattgctgcgacctccacattcggtgagttcagagttctcagtctttgtttctctcttgagggaaactgaatatttttgtttgcttactttggtattgtttgggctgatgtgaggaaatgttcatgttggtttctatctctcttttttttttgaactttagagaatgttcttggaacttgttttggtcatggttttctttgggaacctcatcaccaatgcacaatctttttgcaagaacgataaagttcaggactgaatcactgcactccttttcatcagctcagatgctttgccatgcatttgaatcctagagtaaggtctattagtttacagctaaaagctggggggcaaagaagtgtaaaagaaagagaggaagaaaatttcatcaattttttagggaaattccactattttttgtttggtagtaggtgggtcattggttgcagttaagaacccatcacacctcccccacacactttgccagtttggtgtgaagtaaatatcggttcagttagtagtagcactcttttgcttcacattttccttgcaaaactaaaatgcttttcaagattgttctagtcagataatggctcaccaggtgttcataaagacacaattagcaaggttaaactacctttggtcttgactgttccatcatttcacctgcatatcctagacaagccaaaatgtgaccttcttccttttgcacttgggcaatgccaacatttttgttaacttgacaactaggagggttgcttgctttaattgaaaaaaagaatagcagtgtaccactactgctccataactgtacagaatggacttttacttgtaaaaagtcatacacgctaaagaaatttatggctgctaccggcactgccagcacatgctcatatatgtattgtatgcatctgccggtgcctgacaataataacatggcttggaggcagacaaaattgcaaaacttcctgctacaatttcctttttatttccaagcaagcaaacaatctactattataaatgaagcccaagcctgaatttaatgttctgtatatgtaacaacaatattctgcatcttatattgcaggtgagctgaaggtgaggttgtccatggtgacagggctagagcccagggagcagaggctgctgtttaggggcaaggaaagggaggataccgatcacctccacatggttggggtgagggacaaggacaaggtcctcctcctcgaggaccctgcccttaaggacatgaaggtccgggctgccctcgcagcagcccgggtcatgcagagcccgtgccagccttttatccaagtctaagggttagttggccgtgacccctgttctgttaccacgctaactattagagtactattaataagttgtactacaattttagtcgatcgacatctcaatttctggaaggttttattatatccggaataggtggggggttggtgctgttcaccccctcctctctttagtttactgtcagtggtgccactccatggtagggcaaagggtccctcaacatgagagtgtatgagagtgtgtgagttgtttaatgatgggttagttagttgcaagtgtccagccatggtggttgtgatgtgatgtgatgctaagctttggtgctgggctcctatggtccctggtactgtgctctggtctttttcccattcctacataggttatggacaggaaatgggggctaaagacgatgtattttgtgttttcttgaatggaaactgaatgtgtgtgttcgtttcgttgttcctgccttctgtcggattcctcatgattttgattgcgatgttgtttgtatggagaaagagccatgaatgatgcttcaggttgaagaaacggaacattggtgatatggaaaatctttaggtgataatggaaaatattgtgcggttgtgccattgagagttttgagacaatgtgctaagttgtcttgtgcggaaattgctacgtatacgacctaactgtccaactcacgtatgaatgaactacatcaacgattgcaaacggctgcaatacatatgaatatactctcctttgattgatacatggttgcatatctctagttgtatgtgagttgtataactgggtcgtacgtatagcagtactcgccttgtgcttagggcttatttggttcataggatttccaaaacataggattaaaagaagtaaattattaggatgacacatgcactctaatccttagaagttttttttatggaacaagattataaggatacaatccttacatattccgtaggatctgttactatgaaacaaataatgcacaaagaaaaaaaccatgaggtttcaattactacaataatcctttggaaatcttttgaaaggaatgagcccttaaagatttcagattgggctgtcagtgagtacaaaatagtcaccgagatgttccccatttacagacatcaacaaccaacatctgcactggaataaagctttcgcttatctctttcatgtttgaattgacagcattgacactgaaacactaaaaaagaaaggtcactaggcttcagaagaaagcaagtgcaaagaccagggcatggcctacttcatttataagctgttttaattctcaagtatttcacttctcacgctaagaccagggcaattgctaattaaattgatcctcgcagatccaaatgtaggaacaaagggaatgtcaaaaacagccaacattctcaaataccaagttcataagatttcctgaaaagtgggtgaaatgacaagttcataaaatttcgcaaaatggtaaacctgcctgaaagcttctgaataaaagggcagtgaaaaacagccacaattactagtaagatgcgaaatttacataagtattcttggagacaaggaatgcagcattcatagaactacctcatgcaaaggccaattgcttctggatgtacacttgacagttcagagaactgttcagcacttcagttttgtcaaacagccaagaggataagcattccccggccattcctgcactgggcagtacttgtgttgtatagtggagtagtacataaataaagctacgaaaggacgatgaattaggctgcgttttggcgccaaaaaggtgagaatttttcgctctatcttaactgcatgcatcgatgcctacccccagattcccaatctagtcttgttgatgcaaaagttgacctagtaatattctctgattctctcatcaaaggggggaaaaaagctcatgcctctttcctttctccaatccccatcatcatcagcaagaggaagcaagtccactaccactcactcatggtccatgactccatgggaagccatgcttctatccacaccacatctgccacatctgcggattgattgctcgccgatctcgcgtgctggtatcaacgtggaatagtcgcgcgcgcgcgcgtgcgattcgcgggtcctcgcgtcctgtgtgtcccgtcgaatcagcgtacgagcgcgcgtggagggagaggtggtactgcaggtctgcagcgttgcggtggccggcgatcacgggcggtcggtggcgggctccccgccgcagccgccgtcaaaatctgcggctgttgtgtgcgtccgcgcgaggctggtttctctctcgttgcattaattcgggtcggacctgagaggcccagttacggcccgtcagtcaggttagaatttttcactctcattgactaatactaaactgatagcactgtggtacgtaccaactgtgccgtattgacgtgtttgtatcaccgtatcaccttacgcctatcagttatcataatgtaccatccagcaaaaattacatgaaaatattgagctgatttgtattgaagtcaccttacattacaccttaaacacttttttttcaactttaatagtaagaaaaattagttatatgaaattgaaaattcattggttttcttatatgctattgaaaattcactgtcatctctctcactctccaaccctcgggacgttgttggcagtggtgccattttcatgttggtaacttcaatccctacgccaccaacgtcatgtcgtcctcccattgttgatttgttgcctattattctgcaccctatacacttcaatccttatacgttccactgccatttcattgtcccccatcctcccatcactatttcattatcccccgtcttgtcatcgctatttcatccccccccccagatccacccctctccacttcaatccttttctcccaaaaatctacaaccctagggagtcgtcggacgccaaatcatcgccccttgcttttgaacctttgcacttcaatcattgcgtgatctcccatcgtgccagtttgttgatcttgtctttctaccccaatctactgccccaagctccacccctacacatttcgatccttatgccactgacaccaacattgtcctcctaccaccagttcattgccccgtaatacatccctccgtactttaatccttacaccaccgacatcaatgttgtcctcccaccaccaattcattgctccaatccatactctgtcgatgctactacaccaccaatgttgttcttcgttgataatttgttgctctcatcctcccaccaccattttgttgcgtcatcctcccaccactagttcgttgccccatgctctggccctctgccaccgtactcccaccattagtttgttgctctctgctattgtcctccactgatgtatggttgttatccaaaatacatattggtacgctatcacattaaataggcatatatttgtataatatatcgtatacacttttgttctcttctcgtgttctcttctcgtgtgagaggaataatctaggtaccatagccctaccggttgataaggatttcatcaagattcagggggtgtttagatcctttattcctaggactaaaataagtcctaggactaaacacttcccgatcggagatccatgaatcacagacgctagtccacggctgtttggatatagggactaaaagggaaggtcattaattacactgtataatggccatgctaccctaaaagcatgtaaagagagatgcaccatgcctatgtgtgggggcagtgggtggaaaggagctattttagtcccaataagctcctaccataggaactaatggactaatgtactttaagtcatttttagtccctcctgtttgagactttagggactaaaagggactgaaactttagtccctccaaccaaacatggcctcatgctagtgcggaccgctttacataaaattaaagttatctaaccggttgactgtgctcgtggtgtgggaaattgatcttgtgtaccactgtcaactctttactaactaagcaagcagcaggtgttggttgtatagctaaaataaaattcacgttgcaatgacaatgttagtacactatagttatttgtaattttagtatatacgagttgctaatattattattttgaattaggatgtagcaaataaactacacaatatatgtatttgatatcatattatacgagagctcttaagggttgataacataattaaaaaaagccaactaatttcgattaagaaacatgtcaggtgctatatggacactctaataaggaaatagatgtatagttcattgaaactgatgattaggaatcctcccatcaagtgtgagtacacaaatagcaatacccgaatctcatgaaatgtctagggtttatcaaaccgtgcgattatcacggttatcacgtgcggtatccttttcagttttcaaagccacggtatacctcataataattacatagtttttatgataaccatgtggttaccagggtaactgctaaatcgtgggtggtactggcaagggtctggatcccctggagttaagtataactctaccgggtggagttggccaaatctgtgctatccattgtttcctacggctgagatcattcctcatcaatttaacctaataaattttttttgaaggaaatttcacctaataaataactccttaaattaattaatggttatgacttagttttttcatgtgtttgctcaataatagcgatttgattaagttctcacccccaaaaaaaaatgtaacagaacaacgttttgttattccccaaacaacagatatagtcgatcaactctaaagcggcagtcagtgtatatcaacatagtgctttcacatatatgcaaatagcaaaccatatcaatattaatgtgtatgattttttaaataatagatgaatcttgaattttttgtgctaattatacggtaaaaatgatctcgtgacaagctgttgatgcaagattatttgttgcatggtcagttactggtttttaagtataaattaatgtggcttaatcctagcccttgaagtatgccgaatggcacagatttgaccaactccacccggtagagttatacttaactctaggtgatctggctccagataatttggtaaacctggtcgggatccaaatcgcgaaagcttccggtgcttccctgcacaacggtttttgcaaacgaggctattgacatctttgtcttctttcccctgtccactgtggcctctcttctcgcagtccagaattcggatggcatgtgctccggtcaccacgcgactggatttttcatattttggtccttttaaaaaatttatttcgcaaatagacccctaaaaaaacttatcctagaaatggtcctttttggggcgccggagtggctggcgccgtcatccaacgggacggcgccagcctctctggcgccgtcctcctgccaccgtggcgcacgcgaaccgacgtggtaggaggagcagctggcgccgccccagggaggagggcgccagcatggctggcgccgccgcctccatttctgtttctctgtatggagttgcaacggtgtcatttttattttattttttcggatgttttttcacactcaggatcacgatacaaccaaccacaaaaaaaatttaaactcgaactaccacttagctaagtctgaaaatatctagcataccacttagtctactttgcaccttcactaaaattagaccataactcctttagtaaaaccctttgattagcatgttaaacataatgcactctaccactatatgaaattacttaatctaattcaaaatataatcatatgaaatgacatatataagttaaacagtacatagacatgcaatttttttatttttatttcatttttttgatatttttttcacacttaggagaacataggaaccaaccgtataaaaaataaactcaaacggacaaaatatgtgacatgtagaattttccaaaactctaccgaaacggacaaaatatgtcatctatttaaataggcgtaactttcttatacggactcgaaatcaggaaaataatatatgcacagacatctacagaaaaagttacatccaattctccccgctttgccgggttcggcgatattaaatcccccaaattccgtttgcaagattgtgttttcgaggagagaagtttttcggtggagctttggaaaattccacatgccacatatttcgtccgtttgagtttattttttacatggttggttcctgtgagttcctaagtgtgaaaaaaatatcaaaaaaataaaataaaaataaaaaagttgcacatctctctcctctgcactagttcggagagaagagaggagaggaaaaattctacatgtcacatattacgtccatttgagttcaatttttctatggttggttcttgtgtgttcctaagcatgaaaaaaaatatcaaacaaataaaacaaaaataaaaaatttcggggggggggggggggcgccagccactctggcgcactccccctagccacctcagcatcaccccgccacattggcagggggacggcgccaaagaggctggcgccgtcctgttgaacgacggcgccagccactctggcgccccaaaaaggaccatttttcggataagtttttctaagggtctacttgcgaaataagtttttcaaaaggaccaaaatgtgaaaaatccagcaccacgcgacgcatccggtcgggaccatcccttccttccctccccttccctgccaaactcccagcttcgcgctgcctcgctgccgctgccgccgccgccgcgacccccacttctccgccagcaaagcgagctgctctgctccggttgccttcctccctaagcctgctctgctcgcgggcaccagattcggcgggcagcgaagcagacagctctctccgcccctgccttttctgtttcttgattagtataatatcaattaggaggcttttctttgctttcgatgggtgtgtgcgtgcgtgttggtaattttgattagttagcggcccatcctagccacgcgacgccgatctccagggcgcggctgttcttgccaaaccgcaaccaccactagcccccacttcgtccggttttaattttcaattatcttggcagttcgtgagcctttcgttttcttggggctccagggtttcgcgtctctctctggtttggactttgagacttgacgacgctctggtgagcggtgagtttcttggaaaattcttgctgcttgactgcttttttttttctatccgtttcctggagagattttcggtttactcattgttgattttgccgtgattgggttgggcagggttgatcggcgttgaggaagagattgggcggaaggttgtcgatggagccgccgtctgggattcgggcatctgcctggagcttcttcaagttcctgcctttcttccttggccttctcctcctggggatcatcaaaggtgaagagaaaacactggttgtattggttcatcttgtttggttgcttctgtttgtttgtgctaagaaagtattgtcatgagagtattagaggagaacttcacatagcagtgtctctgtaattatgtactgtggaattgtggcgcatttgttagtttttgatcagaatggcaagccgaagatctctctgggtgacccatttgcattttccttgcattagggtagtttggttgagtgggttggaattggaatcgctcagaggatgtcattgttttcctttttccttcttttttggctgattagttaaagttttttggattttagcctctctttttttttttgttctggttcagctggagttcgtcacttgcacttcatttagactgattgcaactgtccattgcaaaaggggaattgaagtacggtactaggtatctgtaaattccagaatgcaaaatcgttgtacgaacttaaatgccttttcagcatatgatcaaatactacttagtaatttttgccgtcccatgttcccatttttgaacctcagattctgacttgcaattcctccctacgtgttaattttgcctatgcaggtgctttgctcttcccatgggcatggcttatcatgatgatcggaatctctgcactcgttcttggcttatggcctatgcatgtgatctggacatactactgcatcatcaggtttaggattcacaactcagtacagatccgttccaaagagaattaccacataattatgaaaactgtacttatatatgcttgtcatctttttttcggaaagcagatccaagcttgtcgggcctgttgtaaagctgcttcttcttgtcgccgcatctgtgattttagtcttatggctcattgtcgggatcgtgggaagtgtcctaattggtgtggtgtatggttttctcgctccagtaatggccacatttgatgcagttggagaaggaaaagaaagaccactataccactgttttgtggtacattttccttttcgttgatttactctggcattttccttgttcttacttctaaagatttattccttcgaaaaaataacttctcaagttctacatcggtatatgcaacttgaaatgcaggatggaacatggagtactataacaggaagctgtacagtagttagggacctgaaagatttattattgcattcatatttttcaataatggatgaccttcgttttcatgcacctcctggaggagagccatatgaaataaggtttgttttctcctttcaaggttgcattttattgtcaggacatggaatcttcatctaagattctaacagtgcaaccttctcatgaattcagttattgtttttgctatctgggacctttgttcttacatgcatgaataattaaggtttgcaatagattttgaactgaaaccttaatttacaatgatatgtgggagttttccctcataaatttaacttcaccacgctacaatttcaaaattggtgctgtttatatttatttctgaatgcccgccttgatcttattttcttgaagaattccatataacaaagtcaaataatacttctacatctcccagagtgcttgacattcctggtgcattattcgctgctgcgtgtggatttctagtggatggaataatgttcacactaattgccttctacaagttccctgtgatgcttttcaaaggatggaagcggctgatcgaagacttagtcggcagggaaggacctttcctggagacagcttgtgtgccatttgctggtcttgctattcttctgtggccatttgctgtttttggagcttttctagcctccatcatctccagtattcctttaggtgcttttgctgctgttgtggtttatcaggtagccacttgctgaccgtgaatatttttttttcacttctagtataaattgatctgtctgaggtgaattcatgaagcctaaccatgtctctgtgccaggaatcctcgcttatcatgggactaaattatgtaatatcatcagtggccatctttgatgaatatacaaatgatgtgcttgacatggcaccaggatcctgctttcccaggtatgcacgatgctctttatgttttgaatcctccttgtctgaatgatacaagctaactctaacattctattactaggtttaaataccggaaaaatgaagcttcgacagagggtggttcattatcaaggcctgcctcatttaaggacaagcaagacgggaagaaagctccatcacgtgttacatcgtttaagggcagctttgatgagttcaatccatttaaggtgatctcttctaggctaaaattggcagattttgttgaatcattctactatattaggaggggcaacacctgttcagacttctagagattacactatcctgctcgatcgtcccattttcacttctcatttgcacatcccatgaaagtctgctttagactcgtgcaaatctgtctgattgattttttgaatgaaaaaaaaaatatctgattgatattatgatttagttgctagatcacctgtttgaggagtgtaagcaccgtggagaggttctggttgctgaaggagtgataacaccaaaagacattgaagaaacaaagtcaggaaaaatcgggattggagtacttaatgttggtttgccggcatatgttattcttcacgcactcattagatctgcaaaagctaattctgatggcctaattttaagtaagtaataaaatagtttttcatattcgaaaacaggtgctatgactttgcttgactcaccttttgaaatattatgcaggtgatggttctgaaataacatctgataacaggcctaagaacacaatctttgattggttctttgatcctctgatggtcatcaaagagcaaataaaagcccagaattttacagaagaggaagaagcatacctcaagaagcgagtgctgctgaccagtgatccgaagcgcctcaaagaggttgttcctcatctgccatcatcactgaatgagcgaaaacaagctgaaatcgacgcactttcccggaggtacttctgttcatcacccttcctgttttttaccaactaaagttcttttttttctaatctgtttttaatcctatgcaagattgcaaggaatcacaaggtcgatatcaaggtacccaacggccaagcgtcgtttcgacgaccttgtcagatcactctcggaagagctcgagaggacaatgggtggcagccaatctggcagtgtgtcccagatgcagaaactgagaagcggcatcagccgaatgctcagccagagatccatggggaagaggacgagcaaccgtggtgatgatcgggaggcgcagttgacaattgatccctaacatctccagaaagttcagacagaatttcttcgtcgtctttctagagctactttagctgtcttgatttgtacagaactgtttagaccggtgtatgaactaattctaaccactcttgaatgaaatggatgttgcaagattctgtgtttttggaatcaagcccacacatcttagaataatcggtgcccccaaatacgatgccacctggcaagtagattagtagtagtatgcctttgcatattcattgtgcttaatctctactttggacttgttcctggaatgagtagaatctggaattctggatagaccctgtctgcttgaaaggaacgccatctcaagaagaagctgtatccccaacaatacgggaaaaagagagagaataattctgaaaggcatactcaaatttttcgagttaatttcagttctttgaaatctggcgttacagtaggaaatcaaggactacaggttcatgtttcataatcagtggaaggaatataactcacgatctaaacactgggaatgtaatgtatctatgaagttgtacagcggagccacgtacttgtccaacatgctcaggaaacagtaaaatctcaaacaagaatgactaatctgaagcatcactgcgctttcttcttagcatctttggcttgccccttcttgcggatcttgatgcacattcccaggcgaatgctgtcaatgagtgactcggggagaatggagatcaggaaccacattacagagtgtggccagtacggtgtgcacctcggctcatagcctatgtgacgaatggcagcacgggcgtaggtgtccgcggatgggacaaagaacgaggatttcctgatagaggccatctttgttgccacatacaagggcacctgaacagatcacaagtcatttaagtgtgcaacagttcatatagaagaaagaacagtatctatagtaacaacaggcagggaaattattcagatgtttctttctttcttttttttgttggaccaccaagtacactcaggagacttcacactactgaggtgctctttgtttctcatttacatatgcaatttatctaataatctattttctttttgaatcaggaaggggcattttagataactaaattttcacatgacagataaggttaaaagtagggacagctcagtaatcagtaaaaaaaaaaagaaacgatcttaaaaaataaagtagatgatgagaaaataatggttttatttgagaaagcctttgtcggcatttggttgcatctatgtgcattatgcaatgatttatccttagcagtcttaccaacttcagaaacactctagttaatttagagaacatattgtataaagcttctaccataatatatacaggagaccgattaagacaagtggtgtattctgttttttgtttgaaatttcagttgctgacaagagatatgtaggaaaaaccaaacaagcacttaggtgattatggccataaaaggttatagtcttagataaccaaacgttctaatacaaggaaaatcagatgttgagcttgcaagaaccgcataatggagagatactttgagaaacagaaactagtaattacctggcattgcacatcaatacccttgctcttgtactcaacataaaggcatcttgagaattggtcaacgtaactgagaaacaaaaatttattagtctcagtcctatgttagctaacataggtagattgaaatgaagagagagagagagagagagagagagagagcatcactgttctctccagcagaattaacaattcctatgaaattgtaggaatatatatgctagtaatacatgttaatgtgttcaatttgcatggaaatgggcaaacttgcattaagttgtagagagtacacaagtttatacagaaacagcttcaactaaaaaaatatacatgaggagaaatggtgactttattcatctttccccgctatgtacctctgcataatgccaagatttacgcacagaaaaaagggagaaatgatccaactgttcatacgtgcgcgtggtttgctagcatattttttactcctacatgattgtgctagtgtgctgcaatatttcttggtcttggactcaagatgagccatatcccatgagaatagacccaccaggtactccagttttcaaagcatctagttactgtaacaaacccgtcagaaacaactgcaagtgattttattaatatactatggcatgttaaaaataagcaattcacattcttctaattcactaacagaccgctgactgatttcacaacagatctgaccacaacttcggcatatcacaagctaaaaaggcactaaatgatgtactattccagtctccagctacttctggattggcaccagaatctgatacgggtgtgacatcagaatttcaaaactaacagctcacaccaaaagcgctcggtttccctattcaaaccccaaaatcttcctaataggttggaaaatcaagtagtgaagtaacaagtatttgcactaccgccatctatcatcaggaacattcagataaattaaagcaccgcatctaaacttaactatacttcagaacacagagcaaactagcaaagtggttgtgaacttgcaattaggggatacaagaacacgagggagagctcacgctttggtggcggcgtagacggagtagagcggatcggacggcatgacggaggaggagccggagccgatgttgacgatggcgccgcgcttcctctccaccatggccgggagcacggcgtgcgtgacccgcgtgaggccctcgacgttgacccggatcagggtgcgcatgagctcctcgtccacctcgtggaggtagcgggcgtacgggtacgagacaccggcgttgttgacgagcacgcccacctcgagcccacggatggcctccctgagcccctccaccccggcggcgaggccgtcggcggcgaagtcgagcacgaacgtccgcacctccaccctggggtacctccccctgatctcctcggagaccgaggccagcttgtcggggctccggccgacgaggacgaggccgagccccgaggcggcgaggcggaacgccatggcgcggccgatgccgtcggtggcgcccgtgacgaccgcccaggcgccgtagcggcggcgcaggggcttccccgggcggaggaacgcggcgtagagccagagcgcgaggcggagcgcggcgcgggcggcggcgaggaggccgacgcccgccagcgccagcgcccacgccggctgcgcgcggaagaactcggcgtgcgcgcacgtgccggccatggcgtggctggcggcggctcgcgcgaggatttcggggggagcggagaagagagatgtgctgatgctgatgagttcgatccggcgcggtgcggaagcggtcagagctatattagctgggaacgtggggttggtggaaccggtgcaccatccagggtgatctgctggaataccgttgcacgctggctttgagttggtgaaagacccaaaaagaggctactccatctatttcatattaaatcgtttatttttttctcaaactttttaaaatttgatcaagtttatagaaaaatatagtagtatttttaacacaaaataaacatattatcaaatttaatgttaattaattaaatagaaaaaccacttaacagtattccataggcacaggataactactgccactaaatttctaactctcactcctcacaccatctattcaaccttatcctctcatcactttcccttccatctcctctctccctctctctccttctgactagcaccctcatggagcacggaggcaacggcggcaactggccttgcagggtggcgcgtcgagcgtggaggaagctgccatcaccgccgccgccattgctgctggtggaggcatgggcggagtagaggagaagatcgtgaagctgttcgtggggtaggtgcccaagcacatgatggaggcggagctgctcaccacatttcaggaggtggccatcgtcgacgaggtcaccgtcatcaaggacaagagacctctttgtgatctgtacacccagatctaggctcgcgacctccaagctcaggtgttgtcttgttctgtgtttgattttgggttctacatgttctatgggtgattctacagctatgatgacttattcatggtattgatttcctttattaattttattcaactctctcttgataaacatatgatttttggttctttattgccgtgatactttagtggtatcatgatactttggtacatgtaggtatcatgtttgatatccaggtatcagacatggtaccagtaggtaccatacttagtacctatggtatcatggctagtacccataggtatcagacctggtacctgcaaggtatcaagtatcagacctagtaccgagcacctgtaaggcatcaggtatcatggctggttgcgaggtatcaagtatcaagcacgacacgtgttctcttgtcttctgccttacctagactcgatccttgtctcctatttgctgtcgcaaccaaagtcctcctctcctgctctggctggggggaagtcttcctaggagtagttgcaggcggcgccagcgaggtattgcgtgcaaagcagggttctagctggttggaggaaggagcactcctgctcggagtagtcacggcggcagcgccgccggcgaggtttcgcacgcggaggcgcgtgataccgagccgggttttggctggggtggaatcgcgtggacagtgtggtcctcggtcaaaaaaaaatatgtcgggggatttagttatcccgtgactaccacgttgcaacagaatcccgtagggtagctgccctcttaataaaattaatttgatattttagatgttgctaaatttttctgtaaacttggtcaaacttaataaaatgtgattatgaaaaaaagttatacgacttataatatgaaacggatagagtaaataaattgtgaagttattcgatttaaatacaatgaaagaataaagttttataataaagtatagtaggtaagtacacagaaaagcacagggtggtatatatggcggttagagtcatggatctattactccctcgtcggaaccggatcctctgacgttgggaaaactacgtcagagggcagtagctcttcgatccaccatcccccaagcatccaacgctcctgatgaatagcgcaatgtggtcctcatttgcagctgcacttgttcactcgtgagggggaaatatcggcgatgccgggtgccgctacttgctcgccaccgtccaccgcgtcaccagctgctactcctctcttgtcgccattcatcacgctgtcggctgcagcgtctctcttgccgccgctgtttgggcaccgcagtccgccatctgcctggccatggccactccggactgctctacagattgcaggttcatcaacacttgtgtgtgcgtctggcttctgcatcaggcatgaagcagccgtcgattcattccctgtgtaggtgtgtaactcatcaacatcatttgtggaaacttcactttcttgccgaccatgttgaagagtgactagcatggcgggttgttggacctcgcaggcggcgccctcggcgatgagaccaagcaggcggaagcgtcacctatgccctcagcgtcggcggcgacgactgaatggtcttctgggttgaagatggagaacggactggcactacgaatgattggtgccgtcggatgcgctacgcacggtgatcccgccttgaacgtccctctgacgtagaggcttctacgtcagaggatctcgttcctcctccgtcagcttgaattctatttcctgcgaatgttgggcatatttgcgagctgaaacgcacctgatttttgaaatgatttttctagttagggatttctggatctccatatgataagagacacatccgtgggtgtggatgcgattgcgagtattgtgtgtgtcttttagtttaatcgggagaatatttataagagaaaatttaagaaaaaagggagtatcattgacagacacctaattctaagccatcgacaagtgtgaatttcatgcaatgtcatcgtacaagtaactttgtattacaaataccatcgttattaggattctgctagcgatcctccgttaattgttataggatgaacaatgtattttacattggatacattgtaaaatacatcctataaaatagaaatgttgtaagagaaatgttgtctaatgtcaatggataacggcaatctttacattggatagaagcatgggatagcatgacaccaccacgagttaaccacaaaagcagagccatgagctttatattgtttgaccacactctttaagcatgataaaatgcgtctactgaactacgtatgcactaaaccacttaccagtttggtgcacctacatctaaaactaaactagactaaactcttatccagcacagttactactttacaaattaaaagaagaaaagacacatcagactatttagtattcaccacatattacataaggaaccatgaaaattcaggaatttggtctttgaatctgctgaagatgaaaattaagtgtttcacgtaaaacgaggttgtaataatgtgtgattaattgagttttaattattacaaacttgaaaaatggattaatctgatattttagagcaactttcatatagaaagttttcacacgaaacgcaccgtttagcagtttgaaaagcatgccacaagtatccaaaatttaaacctatttatagagtatttgaacggggtaaaagatattctttctagatcttaaaaaagaaaaaagtaatgagttaccgtcgtctcacggtttgacagttaccacggtaatcgagtagttaaaaaaaaccatacggttataccgtgatttcgaaaactgaaaaggttactgcaagtgataattgtccgataactgttcggtgttgtaaaccgtacggttgggagtcaggatcagcggttgcaaccaaagttacaaaccggtccatggcgtgcgtggtgcactgcacggggagcgcattggcaagtgcgaaggggacaagacggattgggcttggagcggttggggtttggcgagctgaaactgaagtgagctgaaggaggaaggcgtcatcggctcatcgcggtcacagacggcaggcggaatatggaacagacagatcgatcaatcccaaccatgttagtgtttcctattggatcacctaggtttagatctagtcgggtggttctatttgcgatggatgattgaacaacaatagagaataagggaaagggtttagggatgtgaccggttgacgcgttggatgaagaggaagtcccagccatcgtcgttgtcgtcgctctgcttgacgtgggcggcggcggcgatggcggtcgtgacggcgacggtgctgcgcggcagtggtggtcgtaggggatcccggcgaggtcgtggcgcggcggtggagtcttcccgtcactggctgcgccccctcgatcggttagggtttatggggtggagtggcggcgacggcgacgaacctcgttccttgtgtcgttatgccgtcccgtcctccacccctctttatatggcacagtgtgacggggcccaccagccattgggctgggcgcccccgatcagggcgcgggtcaaggcccccttgagccgttgggctcaaggggagggagatccatctaacattctcccccttgatctcactatttcctttagctttttctattccatcacagatttacatatagagcatgtttcatcgtcacggttaattaccgatggattcgacagccactatacacatctctattcagaaacagatactttaacttttgggccctatagtccaggattcataaggcttcccttaaaacccatgcatgctacatgttccttgaacatgttgggaggtaggcctttcatgagcggatccgcgagcatcctttctgttcttatgtgctcgagactgattgtttgatcccggactttgtctttcacaacatagtactttatgtcaatgtgtttggcagcaccacttgactaattgttgtgagagtacattactgtgggttctttatcgcagtataactttagtggtttctcaatactatcaaccacctttaaaaccgggtatgaacttcattagccagttcacctgccccgtagcctcatggcatgctataaactcggcatacatggtagaccctgcagtggtagtctgttttgagcttttccatgaaatagctcctactgtcagggtaaacatgtatcccgatgttaactttgtattatcttttgcaaagtcagaattcgaataccccactatgtggagcgattctgcttttctgtaagacatcatgaggccttttgttccttgcaatcacgcaagactttctataccaatttccagtgctctaggcctggattactttgaaatctgccaaataacccggtaacaaatgccaagtcaggtcgtgtgcacacttgcgcgtactgtaggcttcctacagttgacgcatatggctttgttttcattttattgagctcatactgatttctgggacattgcgatgccccatacttttcgcctttgactataggagcaggtgtagcactgcatctgtacatattgaatttcttcaacacattttctatatatatatgccttttgagaaaatcccaatgcatactttgttctatttcggtgaatctctatgcccaaaacatatgaagcctcaccgaggtctttcatgtcaaagtttgaggacaagaatttctttatttcctgcagtagattgacatcactactagccagtagaacgtcatctacatacagaattaggaaaatgagtctcccattcttaactttgaatcaatacagttgtcctctacattctcttgaaaacccaaatttctttattgttccatcaaacttcaagtagcattgtctcgaagctttgctttaacccataaatggatctctttatacggcatcccatattttcgtttcatttcatgacgaaacctttcggttgtgccatgtatactttttttcttcaaatcaccatttagaaattccgtttttacatccatctgatgtaattccaaatcataatgtgccactagtgccattataatcatgaaggaatctttacaagagactggagaaaatgtctcattgtaatctcttttctttgcgtgaaaactgttgccacaagtcgcactttaaacttttctatattccctctggagtcatatttgattttgtagacccatttacagcctactgttttggctcctttaggaatttcttctaaatcccagacatcatttaatttcattgatttcatttcatctttcatggcttctcatggcctcttcatatgagatgggatcatcctccatatgcgactctttcaggccttctaggggcctcctattctggcacattatctgtttgaggctgtttcagctcctcctctgatgtggcaataatttctgttgaatcctgtagaacaggttcctcactttcattcattgttgccacaggagagataacaacaggtgttggtaccgcaacggcatgcattgctggcacaacattagcaggtagagagaagaaaggttcctgagtcaacggagcgggtacagacacccgcctctcctcaagatcaatttctcgaactaccgagctccccctaatcatttcgtcttccaagaagacggcgtgtctcgtttctacaaactttgtataactgtttggacagtagaaatgatgaccttttgatctttcagaatagccaataaaatggcagcttactgttttgggttaaatactttatcctttgcaggactcccccacacatggaggatccatagctcatatggtgttttgggcaccgatgcaatctatacattgtatgcattgttctaaaactgagaactccaatggaggaagaattacattcttaaccagtctctcaattctccccctcgaaatatggcctaaacaacagtgccataatttcgatgagacatcaagagttcgctttcttttcttttgtcaacgaggacacaacattcacattctcagaaagagataacaaataaagctgatcttgcaacacaagaccaatacattcattattataccatagttcacatttgccatttcaaatatatcagaatccaatttggatacacttattatcaagtttctttgcaaagaagggacataaaaacgtctggaagtaaaagtgtgaagccattcgcgagttctaggcgaagatctccaacagcctcaacttttgcttcaactccattggcaactctaatggatctttcacttctttgcgtagtcctcattgaacggaatccctttaaacaattacacacatgaatagttgctccagaatcaatccaccatgtggatctagaataaccaatcataatgagattctttacaaatgtaataatgttctcacctttctttgccatgatcactgtcaggaagtcaggacgatctttcttggaatgtcttgtcttcttgcagtgtagacactgatcttgtctcaactgtaaactgttgtttctgaggcagatgctgaggctgtttttcttttgaggagggtgacctgtggctcttttccttgttatctttgacaaggttaatggagtcaccattggtctctttgtgtctttcctcctcttgcacacaattagagatgagctcttcaatattccaattctctgtacttattttgtagttgacaacaaggttgtcaaagttctttggcaatgaggacaaaaccagatggaccagaaagtcatctgagatgcccaaatctttttgcttcaatttggaagccatgttgctcatcctaagaatgtggtcttttacaccacctccatggtacctctctgtaacaagctgatttatcagctgtgtcgcataaaactttgaagaaccactaaactggctctttatactttcgaggtacttagagacagtgtcatactctgggattgagcccaatatggttggctcaatcgtgttctttaccgcagccaaacaattcttgttggctaaggaccatttcgcatgctcaatgtcatacgacatgatgagggaagcattgtccctctctctcttttgtcattcagcatctgactctttttcacctctgaaaatttcagcaggttctataggacatggggtagtcaacacccagtccacctctcccaagataaaagcaaggtcgagttctcttttccattcttcgtagttatctcctttcagggtcggaatatctttaatgtaacccatcaaggagtagccacctgagataatcatgtattgtgagaacaaaattaacattaaaattattatgtattaagtctacatcaccgttgggcagaaaatagacataacacataaagccataactataacattgcaattatcaacgttggtcagaaaaattacaacatcatagcacataattaatgttcctaaaattaaaatctcccgttggttcgaaatttaattttagaaacactaattttcatcaatttcatctatttgcagcggaagatctatatacaattcatataaacaataacaaaactctgttgtttactctctgtaaaaattctcccgttggttcaaatttaaacagaggtaaaacatgtaaaaacaattcaaaattcttttgtaatttgcatgaaaatatacaaaatacatgttcagaagcatttctcacatttatctattctctaaacaattttcacgttggttcaaattgcttagaaataagcacaatcattaaacatattgaaaatgcttccttcggagggacctaaagtgaacttttccggcctttgccggtcggcccatggccaccttgcgcgcgggcgagcgccccctcccctcccccaggccgcaacctgggcctgggccgggaaagccgccgccgcgcgctccccacttgggccgctttcggcccggccgccgtcggccgtccgatcgctagggtttcgatcggacggtcgcgcgggcggatcgggcaaacaaaaccgcccccggccgccggcgccgaaaccctagctcctcttctcttctttctcttgcggttgcacggagcggcgtcgccgtcgccgaaaccctagcacagcgccggcggcggcacggcgacacggcggcgccgtcgcactccccatcgccggtgcgc
